(19) United States
(12) Patent Application Publication
(10) Pub. No.: US 2006/0115485 A1
(43) Pub. Date: Jun. 1, 2006

(54) Methods of preventing and treating RSV infections and related conditions

(75) Inventors: Genevieve Losonsky, Phoenix, MD (US); Edward M. Connor, Gaithersburg, MD (US); James F. Young, Potomac, MD (US); Herren Wu, Boyds, MD (US); William Dall'Acqua, Gaithersburg, MD (US)

Correspondence Address: JONES DAY, 222 EAST 41ST ST, NEW YORK, NY, 10017, US

(73) Assignee: MedImmune, Inc., Gaithersburg, MD (US)

(21) Appl. No.: 11/263,230

(22) Filed: Oct. 31, 2005

Related U.S. Application Data
(60) Provisional application No. 60/623,821, filed on Oct. 29, 2004.
(60) Provisional application No. 60/675,724, filed on Apr. 27, 2005.
(60) Provisional application No. 60/681,233, filed on May 13, 2005.
(60) Provisional application No. 60/718,719, filed on Sep. 21, 2005.
(60) Provisional application No. 60/727,043, filed on Oct. 14, 2005.
(60) Provisional application No. 60/727,042, filed on Oct. 14, 2005.

(51) Int. Cl. A61K 39/42

(52) U.S. Cl. 424/159.1

(57) ABSTRACT

The present invention provides methods for preventing, managing, treating and/or ameliorating a Respiratory Syncytial Virus (RSV) infection (e.g., acute RSV disease, or a RSV upper respiratory tract infection (URI) and/or lower respiratory tract infection (LRI)), otitis media (preferably, stemming from, caused by or associated with a RSV infection, such as a RSV URI and/or LRI), and/or a symptom or respiratory condition relating thereto (e.g., asthma, wheezing, and/or reactive airway disease (RAD)) in a subject, comprising administering to said human an effective amount of one or more antibodies that immunospecifically bind to one or more RSV antigens with a high affinity and/or high avidity. In some embodiments, one or more antibodies comprise a modified IgG constant domain, or FcRn-binding fragment thereof resulting in longer in vivo serum half-life. In particular embodiments the methods of the invention comprising administering to subject an effective amount of one or more modified antibodies that immunospecifically bind to one or more RSV antigens with an association rate (kₒₙ) of at least 2×10⁵ M⁻¹s⁻¹ and a dissociation rate (k_{off}) of less than 5×10⁻⁴ s⁻¹.

### CROSS-REFERENCE TO RELATED APPLICATIONS

[0001] This application claims priority to each of U.S. Provisional No. 60/623,821 (Attorney Docket No. 10271-149-888) filed Oct. 29, 2004 by Genevieve Losonsky entitled “Methods of Administering/Dosing Anti-RSV Antibodies for the Prophylaxis and Treatment of Upper Respiratory Tract and Middle Ear Infections;” U.S. Provisional No. 60/675,724 (Attorney Docket No. 10271-156-888) filed Apr. 27, 2005 by Genevieve Losonsky entitled “Methods of Administering/Dosing Anti-RSV Antibodies for Prophylaxis and Treatment of Upper Respiratory Tract and Middle Ear Infections;” U.S. Provisional No. 60/681,233 (Attorney Docket No. 10271-162-888) filed May 13, 2005 by Genevieve Losonsky entitled “Methods of Administering/Dosing Anti-RSV Antibodies for Prophylaxis and Treatment of RSV Infections and Respiratory Conditions;” U.S. Provisional No. 60/718,719 (Attorney Docket No. RS 108P4) filed Sep. 21, 2005 by Genevieve Losonsky entitled “Methods of Administering/Dosing Anti-RSV Antibodies for Prophylaxis and Treatment of RSV Infections and Respiratory Conditions;” U.S. Provisional No. 60/727,043 (Attorney Docket No. 10271-165-888) filed Oct. 14, 2005 entitled “Methods of Preventing and Treating RSV Infections and Related Conditions;” and U.S. Provisional No. 60/727,042 (Attorney Docket No. 10271-174-888) filed Oct. 14, 2005 by Genevieve Losonsky entitled “Methods of Administering/Dosing Anti-RSV Antibodies for Prophylaxis and Treatment of RSV Infections and Respiratory Conditions;” each of which is incorporated herein by reference in its entirety.

### 1. INTRODUCTION

[0002] The present invention provides antibodies that immunospecifically bind to a respiratory syncytial virus (RSV) antigen with high affinity and/or high avidity. In some embodiments, the antibodies are modified antibodies that have increased in vivo half lives due to the presence of an IgG constant domain or a portion thereof that binds FcRn, having one or more amino acid modifications that increase the affinity of the constant domain, or fragment thereof, for the FcRn. The invention also provides methods of preventing, managing, treating and/or ameliorating a RSV infection (e.g., acute RSV disease, or a RSV upper respiratory tract infection (URI) and/or lower respiratory tract infection (LRI)), said methods comprising administering to a human subject an effective amount of one or more of the antibodies (e.g., one or more modified or unmodified antibodies) provided herein. The present invention also provides methods for preventing, treating, managing, and/or ameliorating an ear infection (such as otitis media), or a symptom thereof, which is associated with or caused by a RSV infection. The present invention further provides methods for preventing, treating, managing, and/or ameliorating respiratory conditions, including, but not limited to, asthma, wheezing, reactive airway disease (RAD), or a combination thereof, which are associated with or caused by a RSV infection.

### 2. BACKGROUND OF THE INVENTION

### 2.1 Respiratory Syncytial Virus

[0003] Respiratory infections are common infections of the upper respiratory tract (e.g., nose, ears, sinuses, and throat) and lower respiratory tract (e.g., trachea, bronchial tubes, and lungs). Symptoms of upper respiratory infection include runny or stuffy nose, irritability, restlessness, poor appetite, decreased activity level, coughing, and fever. Viral upper respiratory infections cause and/or are associated with sore throats, colds, croup, and the flu. Clinical manifestations of a lower respiratory infection include shallow coughing that produces sputum in the lungs, fever, and difficulty breathing.

[0004] Respiratory syncytial virus (RSV) is one of the leading causes of respiratory disease worldwide. In the United States, it is responsible for tens of thousands of hospitalizations and thousands of deaths per year (see Black, C. P., Resp. Care 2003 48(3):209-31 for a recent review of the biology and management of RSV). Infants and children are most at risk for serious RSV infections which migrate to the lower respiratory system, resulting in pneumonia or bronchiolitis. In fact, 80% of childhood bronchiolitis cases and 50% of infant pneumonias are attributable to RSV. The virus is so ubiquitous and highly contagious that almost all children have been infected by two years of age. Although infection does not produce lasting immunity, reinfections tend to be less severe so that in older children and healthy adults RSV manifests itself as a cold or flu-like illness affecting the upper and/or lower respiratory system, without progressing to serious lower respiratory tract involvement. However, RSV infections can become serious in elderly or immunocompromised adults. (Evans, A. S., eds., 1989, Viral Infections of Humans. Epidemiology and Control, 3^{rd} ed., Plenum Medical Book, New York at pages 525-544; Falsey, A. R., 1991, Infect. Control Hosp. Epidemiol. 12:602-608; and Garvie et al., 1980, Br. Med. J. 281:1253-1254; Hertz et al., 1989, Medicine 68:269-281).

[0005] At present, there is no vaccine against RSV, nor is there any commercially available effective treatment. Recent clinical data has failed to support the early promise of the antiviral agent ribavirin, which is the only drug approved for treatment of RSV infection (Black, C. P., Resp. Care 2003 48(3):209-31). Consequently, the American Academy of Pediatrics issued new guidelines suggesting that use of ribavirin be restricted to only the most severe cases (Committee on Infectious Disease, American Academy of Pediatrics. 1996. Pediatrics 97:137-140; Randolph, A. G., and E. E. Wang., 1996, Arch. Pediatr. Adolesc. Med. 150:942-947).

[0006] While a vaccine or commercially available effective treatment are not yet available, some success has been achieved in the area of prevention for infants at high risk of serious lower respiratory tract disease caused by RSV, as well as a reduction of LRI. In particular, there are two immunoglobulin-based therapies approved to protect high-risk infants from serious LRI: RSV-IGIV (RSV-immunoglobulin intravenous, also known as RespiGam™) and palivizumab (SYNAGIS®). However, neither RSV-IGIV nor palivizumab has been approved for use other than as a prophylactic agent for serious lower respiratory tract acute RSV disease.

[0007] RSV is easily spread by physical contact with contaminated secretions. The virus can survive for at least half an hour on hands and for hours on countertops and used tissues. The highly contagious nature of RSV is evident from the risk factors associated with contracting serious infections. One of the greatest risk factors is hospitalization, where in some cases in excess of 50% of the staff on pediatric wards were found to be infected (Black, C. P., Resp. Care 2003 48(3):209-31). Up to 20% of these adult infections are asymptomatic but still produce substantial shedding of the virus. Other risk factors include attendance at day care centers, crowded living conditions, and the presence of school-age siblings in the home. Importantly, an agent that is effective at clearing the virus from the upper and/or lower respiratory tract is likely to be effective in preventing its transmission. Thus, one promising approach to preventing serious RSV infections and subsequent disease is the development of therapies to either clear the virus or reduce viral load from the upper respiratory tract, thereby preventing the progression of the virus to the lower respiratory tract.

[0008] Although RSV-IVIG and palivizumab represent significant advances in the prevention of lower respiratory tract acute RSV disease and mitigation of lower respiratory tract infection, neither has demonstrated efficacy at permissible doses against the virus in the upper respiratory tract and therefore the possible prevention of progression of RSV infection to the lower respiratory tract. In fact, RSV-IVIG failed to clear nasal RSV when administered as a nasal spray in amounts that were effective to clear pulmonary RSV in every animal of the treatment group (Prince et al., U.S. Pat. No. 4,800,078, issued Jan. 24, 1989). The interperitoneal route of administration also failed to clear RSV from the upper respiratory tract with the same efficacy as the lower respiratory tract. It has recently been noted that the immune response elicited by upper respiratory tract infections differs from that induced by lower respiratory infections (van Benten I. J. et al., J. Med. Virol. 2003 October;71(2):290-7). Thus, a need exists for the prevention of acute RSV disease in the lungs via treatment of RSV URI and/or prevention and/or reduction of the progression of the virus to the lower respiratory tract.

### 2.2 Otitis Media

[0009] Otitis media is an infection or inflammation of the middle ear. This inflammation often begins when infections that cause sore throats, colds, or other respiratory or breathing problems spread to the middle ear. These can be viral or bacterial infections. RSV is the principal virus that has been correlated with otitis media. Seventy-five percent of children experience at least one episode of otitis media by their third birthday. Almost half of these children will have three or more ear infections during their first 3 years. It is estimated that medical costs and lost wages because of otitis media amount to $5 billion a year in the United States (Gates G A, 1996, Cost-effectiveness considerations in otitis media treatment. Otolaryngol Head Neck Sur. 114 (4): 525-530). Although otitis media is primarily a disease of infants and young children, it can also affect adults.

[0010] Otitis media not only causes severe pain but may result in serious complications if it is not treated. An untreated infection can travel from the middle ear to the nearby parts of the head, including the brain. Although the hearing loss caused by otitis media is usually temporary, untreated otitis media may lead to permanent hearing impairment. Persistent fluid in the middle ear and chronic otitis media can reduce a child's hearing at a time that is critical for speech and language development. Children who have early hearing impairment from frequent ear infections are likely to have speech and language disabilities.

[0011] Although many physicians recommend the use of antibiotics for the treatment of ear infections, antibiotic resistance has become an important problem in effective treatment of the disease and do not treat otitis media of viral etiology. Further, new therapies are needed to prevent or treat viral infections that are associated with otitis media, particularly RSV.

### 2.3 Asthma and Reactive Airway Disease (RAD)

[0012] About 12 million people in the U.S. have asthma and it is the leading cause of hospitalization for children. The Merck Manual of Diagnosis and Therapy (17th ed., 1999).

[0013] Asthma is an inflammatory disease of the lung that is characterized by airway hyperresponsiveness (“AHR”), bronchoconstriction (i.e., wheezing), eosinophilic inflammation, mucus hypersecretion, subepithelial fibrosis, and elevated IgE levels. Asthmatic attacks can be triggered by environmental triggers (e.g., acarids, insects, animals (e.g., cats, dogs, rabbits, mice, rats, hamsters, guinea pigs, mice, rats, and birds), fungi, air pollutants (e.g., tobacco smoke), irritant gases, fumes, vapors, aerosols, chemicals, or pollen), exercise, or cold air. The cause(s) of asthma is unknown. However, it has been speculated that family history of asthma (London et al., 2001, Epidemiology 12(5):577-83), early exposure to allergens, such as dust mites, tobacco smoke, and cockroaches (Melen et al., 2001, 56(7):646-52), and respiratory infections (Wenzel et al., 2002, Am J Med, 112(8):672-33 and Lin et al., 2001, J Microbiol Immuno Infect, 34(4):259-64), such as RSV, may increase the risk of developing asthma. A review of asthma, including risk factors, animal models, and inflammatory markers can be found in O'Byrne and Postma (1999), Am. J. Crit. Care. Med. 159:S41-S66, which is incorporated herein by reference in its entirety.

[0014] Current therapies are mainly aimed at managing asthma and include the administration of β-adrenergic drugs (e.g., epinephrine and isoproterenol), theophylline, anticholinergic drugs (e.g., atropine and ipratorpium bromide), corticosteroids, and leukotriene inhibitors. These therapies are associated with side effects such as drug interactions, dry mouth, blurred vision, growth suppression in children, and osteoporosis in menopausal women. Cromolyn and nedocromil are administered prophylatically to inhibit mediator release from inflammatory cells, reduce airway hyperresponsiveness, and block responses to allergens. However, there are no current therapies available that prevent the development of asthma in subjects at increased risk of developing asthma. Thus, new therapies with fewer side effects and better prophylactic and/or therapeutic efficacy are needed for asthma.

[0015] Reactive airway disease is a broader (and often times synonymous) characterization for asthma-like symptoms, and is generally characterized by chronic cough, sputum production, wheezing or dyspenea.

### 2.4 Wheezing

[0016] Wheezing (also known as sibilant rhonchi) is generally characterized by a noise made by air flowing through narrowed breathing tubes, especially the smaller, tight airways located deep within the lung. It is a common symptom of RSV infection, and secondary RSV conditions such as asthma and brochiolitis. The clinical importance of wheezing is that it is an indicator of airway narrowing, and it may indicate difficulty breathing.

[0017] Wheezing is most obvious when exhaling (breathing out), but may be present during either inspiration (breathing in) or exhalation. Wheezing most often comes from the small bronchial tubes (breathing tubes deep in the chest), but it may originate if larger airways are obstructed.

[0018] Citation or discussion of a reference herein shall not be construed as an admission that such is prior art to the present invention.

### 3. SUMMARY OF THE INVENTION

[0019] The present invention provides antibodies with a high affinity and/or high avidity for a RSV antigen, such as RSV F protein, that are effective in reducing upper as well as lower respiratory tract RSV infections at dosages less than or about equal to the dosage of palivizumab used to prevent only lower respiratory tract infection.

[0020] Additionally, the present invention provides an antibody with high affinity and/or high avidity for a RSV antigen (e.g., RSV F antigen) for the prevention, treatment and/or amelioration an upper respiratory tract RSV infection (URI) and/or lower respiratory tract RSV infection (LRI), wherein the antibody comprises one or more amino acid modifications in the IgG constant domain, or FcRn-binding fragment thereof (preferably a modified Fc domain or hinge-Fc domain) that increases the in vivo half-life of the IgG constant domain, or FcRn-binding fragment thereof (e.g., Fc or hinge-Fc domain), and any molecule attached thereto, and increases the affinity of the IgG, or FcRn-binding fragment thereof containing the modified region, for FcRn (i.e., a “modified antibody”). The amino acid modifications may be any modification of a residue (and, in some embodiments, the residue at a particular position is not modified but already has the desired residue), preferably at one or more of residues 251-256, 285-290, 308-314, 385-389, and 428-436. In other embodiments, the antibody comprises a tyrosine at position 252 (252Y), a threonine at position 254 (254T), and/or a glutamic acid at position 256 (256E) (numbering of the constant domain according to the EU index in Kabat et al. (1991). Sequences of proteins of immunological interest. (U.S. Department of Health and Human Services, Washington, D.C.) 5^{th} ed. (“Kabat et al.”)) in the constant domain, or FcRn-binding fragment thereof. In other embodiments, the antibodies comprise 252Y, 254T, and 256E (see EU index in Kabat et al., supra) in the constant domain, or FcRn-binding fragment thereof (hereafter “YTE” see, e.g., FIG. 35).

[0021] The present invention provides methods of preventing, managing, treating, neutralizing, and/or ameliorating a RSV infection (e.g., acute RSV disease, or a RSV URI and/or LRI) in a subject comprising administering to said subject an effective amount of an antibody provided herein (a modified or unmodified antibody) which immunospecifically binds to a RSV antigen with high affinity and/or high avidity. Because a lower and/or longer-lasting serum titer of the antibodies of the invention will be more effective in the prevention, management, treatment and/or amelioration of a RSV infection (e.g., acute RSV disease, or a RSV URI and/or LRI) than the effective serum titer of known antibodies (e.g., palivizumab), lower and/or fewer doses of the antibody can be used to achieve a serum titer effective for the prevention, management, treatment and/or amelioration of a RSV infection (e.g., acute RSV disease, or a RSV URI and/or LRI), for example one or more doses per RSV season. The use of lower and/or fewer doses of an antibody of the invention that immunospecifically binds to a RSV antigen reduces the likelihood of adverse effects and are safer for administration to, e.g., infants, over the course of treatment (for example, due to lower serum titer, longer serum half-life and/or better localization to the upper respiratory tract and/or lower respiratory tract as compared to known antibodies (e.g., palivizumab).

[0022] Accordingly, the invention provides antibodies, and methods of using the antibodies, having an increased potency and/or having increased affinity and/or increased avidity for a RSV antigen (preferably RSV F antigen) as compared to a known RSV antibody (e.g., palivizumab). In some embodiments, the antibodies comprise a modified IgG constant domain, or FcRn-binding fragment thereof (preferably, Fc domain or hinge-Fc domain), which results in increased in vivo serum half-life (i.e., a modified antibody of the invention), as compared to antibodies that do not comprise a modified IgG constant domain, or FcRn-binding fragment thereof, e.g., as compared to an the antibody that does not comprise the modification (i.e., an unmodified antibody), or as compared to another RSV antibody, such as palivizumab. In certain embodiments, the antibody is administered once per RSV season.

[0023] In one aspect, the invention provides a method of preventing, managing, treating and/or ameliorating a RSV infection (e.g., acute RSV disease, or a RSV URI and/or LRI) and/or a symptom or respiratory condition relating thereto (e.g., asthma, wheezing, and/or RAD), the method comprising administering to a subject (e.g., in need thereof) an effective amount of an antibody described herein (i.e., an antibody of the invention), such as an antibody that does not comprise a modified IgG constant domain (e.g., MEDI-524) or such as a modified antibody that does comprise a modified IgG constant domain (e.g., MEDI-524-YTE). In some embodiments, both upper and lower respiratory tract RSV infections and/or acute RSV disease, can be managed, treated, or ameliorated. In other embodiments, the symptom or respiratory condition relating to the RSV infection is asthma, wheezing, RAD, or a combination thereof. The methods of the invention also encompass the prevention of secondary conditions associated with or caused by a RSV URI and/or LRI.

[0024] In a second aspect, the invention provides methods of preventing, managing, treating and/or ameliorating a RSV infection (e.g., acute RSV disease, or a RSV URI and/or LRI), otitis media (preferably, stemming from, caused by or associated with a RSV infection, such as a RSV URI and/or LRI), and/or a symptom or respiratory condition relating thereto (e.g., asthma, wheezing, and/or RAD), the method comprising administering to a subject an effective amount of one or more antibodies of the invention and an effective amount of one or more therapies other than an antibody of the invention. In some embodiments, the antibody is a modified antibody (e.g., MEDI-524-YTE).

[0025] In a third aspect, the invention provides methods for preventing, managing, treating and/or ameliorating a RSV infection (e.g., acute RSV disease, or a RSV URI and/or LRI), otitis media (preferably, stemming from, caused by or associated with a RSV infection, such as a RSV URI and/or LRI), and/or a symptom or respiratory condition relating thereto (e.g., asthma, wheezing, and/or RAD) in a subject, said methods comprising administering to said subject at least a first dose of an antibody of the invention so that said subject has a serum antibody titer of from about 0.1 μg/ml to about 800 μg/ml. In some embodiments, the serum antibody titer is present in the subject for several hours, several days, several weeks, and/or several months. In one embodiment, the first dose of an antibody of the invention is administered in a sustained release formulation, and/or by pulmonary or intranasal delivery. In certain embodiments, the antibody is a modified antibody.

[0026] In a fourth aspect, the invention provides methods for preventing, managing, treating and/or ameliorating a RSV infection (e.g., acute RSV disease, or a RSV URI and/or LRI), otitis media (preferably, stemming from, caused by or associated with a RSV infection, such as a RSV URI and/or LRI), and/or a symptom or respiratory condition relating thereto (e.g., asthma, wheezing, and/or RAD) in a subject, said methods comprising administering to said subject a first dose of an antibody of the invention so that said subject has a nasal turbinate and/or nasal secretion antibody concentration of from about 0.01 μg/ml about 2.5 μg/ml. In some embodiments, the nasal turbinate and/or nasal secretion antibody concentration is present in the subject for several hours, several days, several weeks, and/or several months. The first dose of an antibody of the invention can be a prophylactically or therapeutically effective dose. In one embodiment, the first dose of an antibody of the invention is administered in a sustained release formulation, and/or by pulmonary or intranasal delivery. In certain embodiments, the antibody is a modified antibody.

[0027] In a fifth aspect, the invention provides methods for preventing, managing, treating and/or ameliorating a RSV infection (e.g., acute RSV disease, or a RSV URI and/or LRI), otitis media (preferably, stemming from, caused by or associated with a RSV infection, such as a RSV URI and/or LRI), and/or a symptom or respiratory condition relating thereto (e.g., asthma, wheezing, and/or RAD) in a subject, said methods comprising administering an effective amount of an antibody of the invention (e.g., a modified antibody), wherein the effective amount results in a reduction in RSV titer in the nasal turbinate and/or nasal secretion. The reduction of RSV titer in the nasal turbinate and/or nasal secretion may be as compared to a negative control (such as placebo), as compared to another therapy (including, but not limited to treatment with palivizumab), or as compared to the titer in the patient prior to antibody administration.

[0028] In a sixth aspect, the invention provides methods of neutralizing RSV in the upper and/or lower respiratory tract or in the middle ear using an antibody of the invention to achieve a prophylactically or therapeutically effective serum titer. In some embodiments, the antibody is a modified antibody.

[0029] In a seventh aspect, the invention provides high potency antibodies, including modified antibodies, that can be used in accordance with the methods of the invention that have a high affinity and/or high avidity for a RSV antigen, such as the RSV F antigen. In one embodiment, the antibodies have a several-fold higher affinity for a RSV antigen than a known anti-RSV antibody (e.g., palivizumab) as assessed by techniques described herein or known to one of skill in the art (e.g., a BIAcore assay).

[0030] In an eighth aspect, the antibodies (including, e.g., modified antibodies) used in accordance with the methods of the invention immunospecifically bind to one or more RSV antigens (e.g., RSV F antigen) and have an association rate constant or kₒₙ rate (antibody (Ab)+antigen (Ag)—kₒₙ→Ab-Ag) of from about 10⁵ M⁻¹s⁻¹ to about 10¹⁰ M⁻¹s⁻. In some embodiments, the antibody is a high potency antibody having a kₒₙ of from about 10⁵ M⁻¹s⁻¹ to about 10⁸ M⁻¹s⁻¹, preferably about 2.5×10⁵ or 5×10⁵ M⁻¹s⁻¹, and more preferably about 7.5×10⁵ M⁻¹s⁻¹. Such antibodies may also have a high affinity (e.g., about 10⁹ M⁻¹) or may have a lower affinity. In one embodiment, the antibodies that can be used in accordance with the methods of the invention immunospecifically bind to a RSV antigen (e.g., RSV F antigen) and have a kₒₙ rate that is at least 1.5-fold higher than a known anti-RSV antibody (e.g., palivizumab).

[0031] In a ninth aspect, the antibodies (including, e.g., modified antibodies) used in accordance with the methods of the invention immunospecifically bind to one or more RSV antigens (e.g., RSV F antigen) and have a k_{off} rate (Ab-Ag—K_{off}→Ab+Ag) of from less than 5×10⁻¹ s⁻¹ to less than 10×10⁻¹⁰ s⁻¹. In one embodiment, the antibodies used in accordance with the methods of the invention immunospecifically bind to a RSV antigen (e.g., RSV F antigen) and have a k_{off} rate that is at least 1.5-fold lower than a known anti-RSV antibody (e.g., palivizumab).

[0032] In a tenth aspect, the antibodies (including, e.g., modified antibodies) that can be used in accordance with the methods of the invention immunospecifically bind to one or more RSV antigens (e.g., RSV F antigen) and have an affinity constant or Kₐ (kₒₙ/k_{off}) of from about 10² M⁻¹ to about 5×10¹⁵ M⁻¹, preferably at least 10⁴ M⁻¹. In some embodiments, the antibody is a high potency antibody having a Kₐ of about 10⁹ M⁻¹, preferably about 10¹⁰ M⁻¹, and more preferably about 10⁹ M⁻¹.

[0033] In an eleventh aspect, the antibodies, including, e.g., modified antibodies of the invention, used in accordance with the methods of the invention immunospecifically bind to one or more RSV antigens (e.g., RSV F antigen) and have a dissociation constant or K_{d} (k_{off}/kₒₙ) of from about 5×10⁻²M to about 5×10⁻¹⁶M.

[0034] In a twelfth aspect, the antibodies that can be used in accordance with the methods of the invention immunospecifically bind to one or more RSV antigens (e.g., RSV F antigen) have a dissociation constant (K_{d}) of between about 25 pM and about 3000 pM as assessed using an assay described herein or known to one of skill in the art (e.g., a BIAcore assay).

[0035] In a thirteenth aspect, the antibodies, including, e.g., modified antibodies of the invention, used in accordance with the methods of the invention immunospecifically bind to one or more RSV antigens (e.g., RSV F antigen) and have a median inhibitory concentration (IC₅₀) of about 6 nM to about 0.01 nM in an in vitro microneutralization assay. In certain embodiments, the microneutralization assay is a microneutralization assay described herein (for example, as described in Examples 6.4, 6.8, and 6.18 herein) or as in Johnson et al., 1999, J. Infectious Diseases 180:35-40. In some embodiments, the antibody has an IC₅₀ of less than 3 nM, preferably less than 1 nM in an in vitro microneutralization assay.

[0036] In a fourteenth aspect, the antibodies of the invention (e.g., modified antibodies) can be used to prevent, manage, treat and/or ameliorate a RSV infection (e.g., acute RSV disease or a RSV URI and/or LRI), otitis media (preferably stemming from, caused by or associated with a RSV infection, such as a RSV URI and/or LRI), and/or a symptom or respiratory condition relating thereto (e.g., asthma, wheezing and/or RAD), said method comprising intranasally administering an effective amount of the antibodies of the invention, wherein the prevention, management, treatment and/or amelioration is post-infection.

[0037] In a fifteenth aspect, antibodies, including, e.g., modified antibodies, of the invention have reduced or no cross-reactivity with human tissue. In certain embodiments, an antibody of the invention (e.g., a modified MEDI-524 antibody, such as MEDI-524-YTE) has reduced cross-reactivity with human tissue (e.g., skin and/or lung tissue) as compared to another anti-RSV antibody (such as A4B4).

[0038] In a sixteenth aspect, the invention provides methods of prophylactically administering one or more antibodies (e.g., a modified or unmodified antibody) of the invention to a subject (e.g., an infant, an infant born prematurely, an immunocompromised subject, a medical worker). In some embodiments, an antibody of the invention is administered to a subject so as to prevent a RSV infection from being transmitted from one individual to another, or to lessen the infection that is transmitted. In some embodiments, the subject has been exposed to (and may or may not be asymptomatic), or is likely to be exposed to another individual having RSV infection. Preferably the antibody is administered to the subject intranasally once or more times per day (e.g., one time, two times, four times, etc.) for a period of about one to two weeks after potential or actual exposure to the RSV-infected individual. In certain embodiments, the antibody is administered at a dose of between about 60 mg/kg to about 0.025 mg/kg, and more preferably from about 0.025 mg/kg to 15 mg/kg.

[0039] In preferred embodiments, the methods of the invention encompass the use of antibodies comprising the VH domain and/or VL domain of A4B4L 1 FR-S28R (MEDI-524) (FIG. 13). In preferred embodiments, the methods of the invention encompass the use of antibodies comprising the VH chain and/or VL chain of A4B4L1FR-S28R (MEDI-524) (FIG. 13). In certain embodiments, the antibody comprises a modified Fc domain, or FcRn-binding fragment thereof, wherein the antibody has increased affinity for the FcRn receptor relative to the Fc domain of A4B4L1FR-S28R (MEDI-524) that does not comprise a modified Fc domain (i.e., unmodified A4B4L1FR-S28R).

[0040] In preferred embodiments, the methods of the invention encompass the use of modified antibodies, for example any antibody described herein, that comprises a modified IgG, such as a modified IgG1, constant domain, wherein the modified IgG constant domain comprises a modification of a residue (and, in some embodiments, an unmodified residue), preferably at one or more of residues 251-256, 285-290, 308-314, 385-389, and 428-436, that increases the in vivo half-life of the IgG constant domain, or FcRn-binding fragment thereof (e.g., Fc or hinge-Fc domain), and any molecule attached thereto, and increases the affinity of the IgG, or fragment thereof, for FcRn. In certain embodiments, the IgG constant domain comprises the YTE modification. In some embodiments, a modified antibody of the invention (and methods of using the antibody thereof) comprises a VH and/or VL domain(s) of A4B4L1FR-S28R (MEDI-524) (FIG. 13) and a modified IgG, such as a modified IgG1, constant domain, wherein the Fc domain comprises the YTE modification. In some embodiments, a modified antibody of the invention (and methods of using the antibody thereof) comprises a VH and/or VL chain(s) of A4B4L1FR-S28R (MEDI-524) (FIG. 13) and a modified IgG, such as a modified IgG1, constant domain, wherein the Fc domain comprises the YTE modification. In other embodiments, a modified antibody of the invention comprises any VH and/or VL domain(s) of an antibody listed in Table 2 and a modified IgG, such as a modified IgG1, constant domain, wherein the Fc domain comprises the YTE modification. In other embodiments, a modified antibody of the invention comprises any VH and/or VL chain(s) of an antibody listed in Table 2 and a modified IgG, such as a modified IgG1, constant domain, wherein the Fc domain comprises the YTE modification.

### 3.1 Terminology

[0041] The term “about” or “approximately” means within 20%, preferably within 10%, and more preferably within 5% (or 1% or less) of a given value or range.

[0042] As used herein, “administer” or “administration” refers to the act of injecting or otherwise physically delivering a substance as it exists outside the body (e.g., an antibody of the invention) into a patient, such as by, but not limited to, pulmonary (e.g., inhalation), mucosal (e.g., intranasal), intradermal, intravenous, intramuscular delivery and/or any other method of physical delivery described herein or known in the art. When a disease, or symptoms thereof, are being treated, administration of the substance typically occurs after the onset of the disease or symptoms thereof. When a disease, or symptoms thereof, are being prevented, administration of the substance typically occurs before the onset of the disease or symptoms thereof.

[0043] In the context of a polypeptide, the term “analog” as used herein refers to a polypeptide that possesses a similar or identical function as a RSV polypeptide, a fragment of a RSV polypeptide, or an anti-RSV antibody but does not necessarily comprise a similar or identical amino acid sequence of a RSV polypeptide, a fragment of a RSV polypeptide, or an anti-RSV antibody, or possess a similar or identical structure of a RSV polypeptide, a fragment of a RSV polypeptide, or an antibody. A polypeptide that has a similar amino acid sequence refers to a polypeptide that satisfies at least one of the following: (a) a polypeptide having an amino acid sequence that is at least 30%, at least 35%, at least 40%, at least 45%, at least 50%, at least 55%, at least 60%, at least 65%, at least 70%, at least 75%, at least 80%, at least 85%, at least 90%, at least 95% or at least 99% identical to the amino acid sequence of a RSV polypeptide, a fragment of a RSV polypeptide, or an antibody described herein; (b) a polypeptide encoded by a nucleotide sequence that hybridizes under stringent conditions to a nucleotide sequence encoding a RSV polypeptide, a fragment of a RSV polypeptide, or an antibody described herein of at least 5 amino acid residues, at least 10 amino acid residues, at least 15 amino acid residues, at least 20 amino acid residues, at least 25 amino acid residues, at least 40 amino acid residues, at least 50 amino acid residues, at least 60 amino residues, at least 70 amino acid residues, at least 80 amino acid residues, at least 90 amino acid residues, at least 100 amino acid residues, at least 125 amino acid residues, or at least 150 amino acid residues (see, e.g., Maniatis et al. (1982) Molecular Cloning: A Laboratory Manual, Cold Spring Harbor Press, Cold Spring Harbor, N.Y.); and (c) a polypeptide encoded by a nucleotide sequence that is at least 30%, at least 35%, at least 40%, at least 45%, at least 50%, at least 55%, at least 60%, at least 65%, at least 70%, at least 75%, at least 80%, at least 85%, at least 90%, at least 95% or at least 99% identical to the nucleotide sequence encoding a RSV polypeptide, a fragment of a RSV polypeptide, or an antibody described herein. A polypeptide with similar structure to a RSV polypeptide, a fragment of a RSV polypeptide, or an antibody described herein refers to a polypeptide that has a similar secondary, tertiary or quaternary structure of a RSV polypeptide, a fragment of a RSV, or an antibody described herein. The structure of a polypeptide can determined by methods known to those skilled in the art, including but not limited to, X-ray crystallography, nuclear magnetic resonance, and crystallographic electron microscopy.

[0044] To determine the percent identity of two amino acid sequences or of two nucleic acid sequences, the sequences are aligned for optimal comparison purposes (e.g., gaps can be introduced in the sequence of a first amino acid or nucleic acid sequence for optimal alignment with a second amino acid or nucleic acid sequence). The amino acid residues or nucleotides at corresponding amino acid positions or nucleotide positions are then compared. When a position in the first sequence is occupied by the same amino acid residue or nucleotide as the corresponding position in the second sequence, then the molecules are identical at that position. The percent identity between the two sequences is a function of the number of identical positions shared by the sequences (i.e., % identity=number of identical overlapping positions/total number of positions×100%). In one embodiment, the two sequences are the same length.

[0045] The determination of percent identity between two sequences can also be accomplished using a mathematical algorithm. A preferred, non-limiting example of a mathematical algorithm utilized for the comparison of two sequences is the algorithm of Karlin and Altschul, 1990, Proc. Natl. Acad. Sci. U.S.A. 87:2264 2268, modified as in Karlin and Altschul, 1993, Proc. Natl. Acad. Sci. U.S.A. 90:5873 5877. Such an algorithm is incorporated into the NBLAST and XBLAST programs of Altschul et al., 1990, J. Mol. Biol. 215:403. BLAST nucleotide searches can be performed with the NBLAST nucleotide program parameters set, e.g., for score=100, wordlength=12 to obtain nucleotide sequences homologous to a nucleic acid molecules of the present invention. BLAST protein searches can be performed with the XBLAST program parameters set, e.g., to score 50, wordlength=3 to obtain amino acid sequences homologous to a protein molecule of the present invention. To obtain gapped alignments for comparison purposes, Gapped BLAST can be utilized as described in Altschul et al., 1997, Nucleic Acids Res. 25:3389 3402. Alternatively, PSI BLAST can be used to perform an iterated search which detects distant relationships between molecules (Id.). When utilizing BLAST, Gapped BLAST, and PSI Blast programs, the default parameters of the respective programs (e.g., of XBLAST and NBLAST) can be used (see, e.g., National Center for Biotechnology Information (NCBI) on the worldwide web, ncbi.nlm.nih.gov). Another preferred, non limiting example of a mathematical algorithm utilized for the comparison of sequences is the algorithm of Myers and Miller, 1988, CABIOS 4:11 17. Such an algorithm is incorporated in the ALIGN program (version 2.0) which is part of the GCG sequence alignment software package. When utilizing the ALIGN program for comparing amino acid sequences, a PAM 120 weight residue table, a gap length penalty of 12, and a gap penalty of 4 can be used.

[0046] The percent identity between two sequences can be determined using techniques similar to those described above, with or without allowing gaps. In calculating percent identity, typically only exact matches are counted.

[0047] The terms “antibodies that immunospecifically bind to a RSV antigen,” “anti-RSV antibodies” and analogous terms as used herein refer to antibodies, including both modified antibodies (i.e., antibodies that comprise a modified IgG (e.g., IgG1) constant domain, or FcRn-binding fragment thereof (e.g., the Fc-domain or hinge-Fc domain)) and unmodified antibodies (i.e., antibodies that do not comprise a modified IgG (e.g., IgG1) constant domain, or FcRn-binding fragment thereof (e.g., the Fc-domain or hinge-Fc domain)), that specifically bind to a RSV polypeptide. An antibody or a fragment thereof that immunospecifically binds to a RSV antigen may be cross-reactive with related antigens. Preferably, an antibody or a fragment thereof that immunospecifically binds to a RSV antigen does not cross-react with other antigens. An antibody or a fragment thereof that immunospecifically binds to a RSV antigen can be identified, for example, by immunoassays, BIAcore, or other techniques known to those of skill in the art. An antibody or a fragment thereof binds,specifically to a RSV antigen when it binds to a RSV antigen with higher affinity than to any cross-reactive antigen as determined using experimental techniques, such as radioimmunoassays (RIA) and enzyme-linked immunosorbent assays (ELISAs). See, e.g., Paul, ed., 1989, Fundamental Immunology Second Edition, Raven Press, New York at pages 332-336 for a discussion regarding antibody specificity.

[0048] Antibodies of the invention include, but are not limited to, synthetic antibodies, monoclonal antibodies, recombinantly produced antibodies, multispecific antibodies (including bi-specific antibodies), human antibodies, humanized antibodies, chimeric antibodies, intrabodies, single-chain Fvs (scFv) (e.g., including monospecific, bispecific, etc.), Fab fragments, F(ab′) fragments, disulfide-linked Fvs (sdFv), anti-idiotypic (anti-Id) antibodies, and epitope-binding fragments of any of the above. In particular, antibodies of the present invention include immunoglobulin molecules and immunologically active portions of immunoglobulin molecules, i.e., molecules that contain an antigen-binding site that immunospecifically binds to a RSV antigen (preferably, a RSV F antigen) (e.g., one or more complementarity determining regions (CDRs) of an anti-RSV antibody). The antibodies of the invention can be of any type (e.g., IgG, IgE, IgM, IgD, IgA and IgY), any class (e.g., IgG1, IgG2, IgG3, IgG4, IgA1 and IgA2), or any subclass (e.g., IgG2a and IgG2b) of immunoglobulin molecule. In preferred embodiments, modified antibodies of the invention are IgG antibodies, or a class (e.g., human IgG1) or subclass thereof.

[0049] The term “constant domain” refers to the portion of an immunoglobulin molecule having a more conserved amino acid sequence relative to the other portion of the immunoglobulin, the variable domain, which contains the antigen binding site. The constant domain contains the CH1, CH2 and CH3 domains of the heavy chain and the CHL domain of the light chain.

[0050] In the context of a polypeptide, the term “derivative” as used herein refers to a polypeptide that comprises an amino acid sequence of a RSV polypeptide, a fragment of a RSV polypeptide, or an antibody that immunospecifically binds to a RSV polypeptide which has been altered by the introduction of amino acid residue substitutions, deletions or additions. The term “derivative” as used herein also refers to a RSV polypeptide, a fragment of a RSV polypeptide, or an antibody that immunospecifically binds to a RSV polypeptide which has been chemically modified, e.g., by the covalent attachment of any type of molecule to the polypeptide. For example, but not by way of limitation, a RSV polypeptide, a fragment of a RSV polypeptide, or an antibody may be chemically modified, e.g., by glycosylation, acetylation, pegylation, phosphorylation, amidation, derivatization by known protecting/blocking groups, proteolytic cleavage, linkage to a cellular ligand or other protein, etc. A derivative of a RSV polypeptide, a fragment of a RSV polypeptide, or an antibody may be chemically modified by chemical modifications using techniques known to those of skill in the art, including, but not limited to specific chemical cleavage, acetylation, formylation, metabolic synthesis of tunicamycin, etc. Further, a derivative of a RSV polypeptide, a fragment of a RSV polypeptide, or an antibody may contain one or more non-classical amino acids. A polypeptide derivative possesses a similar or identical function as a RSV polypeptide, a fragment of a RSV polypeptide, or an antibody described herein.

[0051] The term “effective amount” as used herein refers to the amount of a therapy (e.g., a modified or other antibody of the invention) which is sufficient to reduce and/or ameliorate the severity and/or duration of a RSV infection (e.g., acute RSV disease or RSV URI and/or LRI), otitis media, and/or a symptom or respiratory condition relating thereto (including, but not limited to, asthma, wheezing, RAD, or a combination thereof); prevent the advancement or progression of a RSV URI to a LRI, a clinically significant acute RSV disease in the lungs, otitis media and/or a symptom or respiratory condition relating thereto (e.g., prevent the progression of an upper respiratory tract RSV infection to a lower respiratory tract RSV infection); prevent the recurrence, development, or onset of a RSV infection (e.g., acute RSV disease, or RSV URI and/or LRI), otitis media, and/or a symptom or respiratory condition relating thereto (including, but not limited to, asthma, wheezing, RAD, or a combination thereof); and/or enhance and/or improve the prophylactic or therapeutic effect(s) of another therapy (e.g., a therapy other than an antibody of the invention). Non-limiting examples of effective amounts of an antibody of the invention are provided in Section 5.3, infra. In some embodiments, the effective amount of an antibody of the invention is about 0.025 mg/kg, about 0.05 mg/kg, about 0.10 mg/kg, about 0.20 mg/kg, about 0.40 mg/kg, about 0.80 mg/kg, about 1.0 mg/kg, about 1.5 mg/kg, about 3 mg/kg, about 5 mg/kg, about 10 mg/kg, about 15 mg/kg, about 20 mg/kg, about 25 mg/kg, about 30 mg/kg, about 35 mg/kg, about 40 mg/kg, about 45 mg/kg, about 50 mg/kg or about 60 mg/kg. In one embodiment, an effective amount of an antibody of the invention is about 15 mg of the antibody per kg of body weight of the subject.

[0052] The term “effective neutralizing titer” as used herein refers to the amount of antibody which corresponds to the amount present in the serum of animals (human or cotton rat) that has been shown to be either clinically efficacious (in humans) or to reduce virus by 99% in, for example, cotton rats. The 99% reduction is defined by a specific challenge of, e.g., 10³ pfu, 10⁴ pfu, 10⁵ pfu, 10⁶ pfu, 10⁷ pfu, 10⁸ pfu, or 10⁹ pfu of RSV.

[0053] The term “elderly” as used herein refers to a human subject who is age 65 or older.

[0054] The term “epitopes” as used herein refers to fragments of a RSV polypeptide having antigenic or immunogenic activity in an animal, preferably a mammal, and most preferably in a human. An epitope having immunogenic activity is a fragment of a RSV polypeptide (e.g., RSV F protein) that elicits an antibody response in an animal. An epitope having antigenic activity is a fragment of a RSV polypeptide to which an antibody immunospecifically binds as determined by any method well known in the art, for example, by the immunoassays described herein. Antigenic epitopes need not necessarily be immunogenic.

[0055] The term “excipients” as used herein refers to inert substances which are commonly used as a diluent, vehicle, preservatives, binders, or stabilizing agent for drugs and includes, but not limited to, proteins (e.g., serum albumin, etc.), amino acids (e.g., aspartic acid, glutamic acid, lysine, arginine, glycine, histidine, etc.), fatty acids and phospholipids (e.g., alkyl sulfonates, caprylate, etc.), surfactants (e.g., SDS, polysorbate, nonionic surfactant, etc.), saccharides (e.g., sucrose, maltose, trehalose, etc.) and polyols (e.g., mannitol, sorbitol, etc.). Also see Remington's Pharmaceutical Sciences (by Joseph P. Remington, 18th ed., Mack Publishing Co., Easton, Pa.), which is hereby incorporated in its entirety.

[0056] The term “FcRn receptor” or “FcRn” as used herein refers to an Fc receptor (“n” indicates neonatal) which is known to be involved in transfer of maternal IgGs to a fetus through the human or primate placenta, or yolk sac (rabbits) and to a neonate from the colostrum through the small intestine. It is also known that FcRn is involved in the maintenance of constant serum IgG levels by binding the IgG molecules and recycling them into the serum. The binding of FcRn to IgG molecules is pH-dependent with optimum binding at pH 6.0. Fckn comprises a heterodimer of two polypeptides, whose molecular weights are approximately 50 kD and 15 kD, respectively. The extracellular domains of the 50 kD polypeptide are related to major histocompatibility complex (MHC) class I α-chains and the 15 kD polypeptide was shown to be the non-polymorphic β₂-microglobulin (β₂-m). In addition to placenta and neonatal intestine, FcRn is also expressed in various tissues across species as well as various types of endothelial cell lines. It is also expressed in human adult vascular endothelium, muscle vasculature and hepatic sinusoids and it is suggested that the endothelial cells may be most responsible for the maintenance of serum IgG levels in humans and mice. The amino acid sequences of human FcRn and murine FcRn are indicated by SEQ ID NO:337 (FIG. 21A) and SEQ ID NO:338 (FIG. 21B), respectively. Homologs of these sequences having FcRn activity are also included.

[0057] In the context of a peptide or polypeptide, the term “fragment” as used herein refers to a peptide or polypeptide comprising an amino acid sequence of at least 5 contiguous amino acid residues, at least 10 contiguous amino acid residues, at least 15 contiguous amino acid residues, at least 20 contiguous amino acid residues, at least 25 contiguous amino acid residues, at least 40 contiguous amino acid residues, at least 50 contiguous amino acid residues, at least 60 contiguous amino residues, at least 70 contiguous amino acid residues, at least 80 contiguous amino acid residues, at least 90 contiguous amino acid residues, at least contiguous 100 amino acid residues, at least 125 contiguous amino acid residues, at least 150 contiguous amino acid residues, at least 175 contiguous amino acid residues, at least 200 contiguous amino acid residues, or at least 250 contiguous amino acid residues of the amino acid sequence of a RSV polypeptide or an antibody that immunospecifically binds to a RSV polypeptide. In a specific embodiment, a fragment of a RSV polypeptide or an antibody of that immunospecifically binds to a RSV antigen retains at least 1, at least 2, or at least 3 functions of the polypeptide or antibody.

[0058] The term “fusion protein” as used herein refers to a polypeptide that comprises an amino acid sequence of an antibody and an amino acid sequence of a heterologous polypeptide or protein (i.e., a polypeptide or protein not normally a part of the antibody (e.g., a non-anti-RSV antigen antibody)).

[0059] The term “high potency” as used herein refers to antibodies that exhibit high potency as determined in various assays for biological activity (e.g., neutralization of RSV) such as those described herein. For example, high potency antibodies of the invention have an IC₅₀ value less than 5 nM, less than 4 nM, less than 3 nM, less than 2 nM, less than 1.75 nM, less than 1.5 nM, less than 1.25 nM, less than 1 nM, less than 0.75 nM, less than 0.5 nM, less than 0.25 nM, less than 0.1 nM, less than 0.05 nM, less than 0.025 nM, or less than 0.01 nM, as measured by a microneutralization assay. In certain embodiments, the microneutralization assay is a microneutralization assay described herein (for example, as described in Examples 6.4, 6.8, and 6.18 herein) or as in Johnson et al., 1999, J. Infectious Diseases 180:35-40. Further, high potency antibodies of the invention result in at least a 75%, preferably at least a 95% and more preferably a 99% lower RSV titer in a cotton rat 5 days after challenge with 10⁵ pfu relative to a cotton rat not administered said antibodies. In certain embodiments of the invention, high potency antibodies of the present invention exhibit a high affinity and/or high avidity for one or more RSV antigens (e.g., antibodies having an affinity of at least 2×10⁸ M⁻¹, preferably between 2×10⁸M⁻¹ and 5×10¹²M⁻¹, such as at least 2.5×10⁸ M⁻¹, at least 5×10⁸ M⁻¹, at least 10⁹ M⁻¹, at least 5×10⁹ M⁻¹, at least 10¹⁰ M⁻¹, at least 5×10¹⁰ M⁻¹, at least 10¹¹ M⁻¹, at least 5×10¹¹ M⁻¹, at least 10¹² M⁻¹, or at least 5×10¹² M⁻¹ for one or more RSV antigens).

[0060] The term “host” as used herein refers to an animal, preferably a mammal, and most preferably a human.

[0061] The term “host cell” as used herein refers to the particular subject cell transfected with a nucleic acid molecule and the progeny or potential progeny of such a cell. Progeny of such a cell may not be identical to the parent cell transfected with the nucleic acid molecule due to mutations or environmental influences that may occur in succeeding generations or integration of the nucleic acid molecule into the host cell genome.

[0062] The term “human infant” as used herein refers to a human less than 24 months, preferably less than 16 months, less than 12 months, less than 6 months, less than 3 months, less than 2 months, or less than 1 month of age.

[0063] The term “human infant born prematurely” as used herein refers to a human born at less than 40 weeks gestational age, preferably less than 35 weeks gestational age, wherein the infant is less than 6 months old, preferably less than 3 months old, more preferably less than 2 months old, and most preferably less than 1 month old.

[0064] The terms “IgG Fc region,” “Fc region,” “Fc domain,” “Fc fragment” and other analogous terms as used herein refers the portion of an IgG molecule that correlates to a crystallizable fragment obtained by papain digestion of an IgG molecule. The Fc region consists of the C-terminal half of the two heavy chains of an IgG molecule that are linked by disulfide bonds. It has no antigen binding activity but contains the carbohydrate moiety and the binding sites for complement and Fc receptors, including the FcRn receptor (see below). For example, an Fc fragment contains the entire second constant domain CH2 (residues 231-340 of human IgG1, see, e.g., FIG. 20B) (e.g., SEQ ID NO:339) and the third constant domain CH3 (residues 341-447 of human IgG1, see, e.g., FIG. 20B) (e.g., SEQ ID NO:340). All numbering used herein is according to the EU Index (Kabat et al. (1991) Sequences of proteins of immunological interest. (U.S. Department of Health and Human Services, Washington, D.C.) 5^{th} ed.), unless otherwise indicated.

[0065] The term “IgG hinge-Fc region” or “hinge-Fc fragment” as used herein refers to a region of an IgG molecule consisting of the Fc region (residues 231-447, see, e.g., FIG. 20B) and a hinge region (residues 216-230; e.g., SEQ ID NO:341, see, e.g., FIG. 20B) extending from the N-terminus of the Fc region, according to the EU Index (Kabat et al. (1991) Sequences of proteins of immunological interest. (U.S. Department of Health and Human Services, Washington, D.C.) 5^{th} ed.). An example of the amino acid sequence of the human IgGI hinge-Fc region is SEQ ID NO:342 (see also FIGS. 20A and 20B).

[0066] The term “immunomodulatory agent” and variations thereof including, but not limited to, immunomodulatory agents, as used herein refer to an agent that modulates a host's immune system. In certain embodiments, an immunomodulatory agent is an immunosuppressant agent. In certain other embodiments, an immunomodulatory agent is an immunostimulatory agent. In accordance with the invention, an immunomodulatory agent used in the combination therapies of the invention does not include an anti-RSV antibody or fragment thereof. Immunomodulatory agents include, but are not limited to, small molecules, peptides, polypeptides, proteins, fusion proteins, antibodies, inorganic molecules, mimetic agents, and organic molecules.

[0067] As used herein, the term “in combination” in the context of the administration of other therapies refers to the use of more than one therapy. The use of the term “in combination” does not restrict the order in which therapies are administered to a subject with an infection. A first therapy can be administered before (e.g., 1 minute, 45 minutes, 30 minutes, 45 minutes, 1 hour, 2 hours, 4 hours, 6 hours, 12 hours, 24 hours, 48 hours, 72 hours, 96 hours, 1 week, 2 weeks, 3 weeks, 4 weeks, 5 weeks, 6 weeks, 8 weeks, or 12 weeks), concurrently, or after (e.g., 1 minute, 45 minutes, 30 minutes, 45 minutes, 1 hour, 2 hours, 4 hours, 6 hours, 12 hours, 24 hours, 48 hours, 72 hours, 96 hours, 1 week, 2 weeks, 3 weeks, 4 weeks, 5 weeks, 6 weeks, 8 weeks, or 12 weeks) the administration of a second therapy to a subject which had, has, or is susceptible to a RSV infection, otitis media or a respiratory condition related thereto. Any additional therapy can be administered in any order with the other additional therapies. In certain embodiments, the antibodies of the invention can be administered in combination with one or more therapies (e.g., therapies that are not the antibodies of the invention that are currently administered to prevent, treat, manage, and/or ameliorate a RSV infection (e.g., acute RSV disease or a RSV URI and/or LRI, otitis media, and/or a symptom or respiratory condition or other symptom related thereto). Non-limiting examples of therapies that can be administered in combination with an antibody of the invention include analgesic agents, anesthetic agents, antibiotics, or immunomodulatory agents or any other agent listed in the U.S. Pharmacopoeia and/or Physician's Desk Reference.

[0068] As used herein, the terms “infection” and “RSV infection” refer to all stages of RSV's life cycle in a host (including, but not limited to the invasion by and replication of RSV in a cell or body tissue), as well as the pathological state resulting from the invasion by and replication of a RSV. The invasion by and multiplication of a RSV includes, but is not limited to, the following steps: the docking of the RSV particle to a cell, fusion of a virus with a cell membrane, the introduction of viral genetic information into a cell, the expression of RSV proteins, the production of new RSV particles and the release of RSV particles from a cell. An RSV infection may be an upper respiratory tract RSV infection (URI), a lower respiratory tract RSV infection (LRI), or a combination thereof. In specific embodiments, the pathological state resulting from the invasion by and replication of a RSV is an acute RSV disease. The term “acute RSV disease” as used herein refers to clinically significant disease in the lungs or lower respiratory tract as a result of an RSV infection, which can manifest as pneumonia and/or bronchiolitis, where such symptoms may include hypoxia, apnea, respiratory distress, rapid breathing, wheezing, cyanosis, etc. Acute RSV disease requires an affected individual to obtain medical intervention, such as hospitalization, administration of oxygen, intubation and/or ventilation.

[0069] The term “inorganic salt” as used herein refers to any compounds containing no carbon that result from replacement of part or all of the acid hydrogen or an acid by a metal or a group acting like a metal and are often used as a tonicity adjusting compound in pharmaceutical compositions and preparations of biological materials. The most common inorganic salts are NaCl, KCl, NaH₂PO₄, etc.

[0070] The term “in vivo half-life” as used herein refers to a biological half-life of a particular type of IgG molecule or its fragments containing FcRn-binding sites in the circulation of a given animal and is represented by a time required for half the quantity administered in the animal to be cleared from the circulation and/or other tissues in the animal. When a clearance curve of a given IgG is constructed as a function of time, the curve is usually biphasic with a rapid a-phase which represents an equilibration of the injected IgG molecules between the intra- and extra-vascular space and which is, in part, determined by the size of molecules, and a longer β-phase which represents the catabolism of the IgG molecules in the intravascular space. The term “in vivo half-life” practically corresponds to the half-life of the IgG molecules in the β-phase. As used herein, “increased in vivo serum half-life” or “extended in vivo serum half-life” of an antibody that comprises a modified IgG constant domain, or FcRn-binding fragment thereof (preferably the Fc domain or the hinge-Fc domain), refers to an increase in in vivo serum half-life of the antibody as compared to an antibody that does not comprise a modified IgG constant domain, or FcRn-binding fragment thereof (e.g., as compared to an the antibody that does not comprise the one or more modifications in the constant domain, or FcRn-binding fragment thereof (i.e., an unmodified antibody), or as compared to another RSV antibody, such as palivizumab).

[0071] An “isolated” or “purified” antibody is substantially free of cellular material or other contaminating proteins from the cell or tissue source from which the protein is derived, or substantially free of chemical precursors or other chemicals when chemically synthesized. The language “substantially free of cellular material” includes preparations of an antibody in which the antibody is separated from cellular components of the cells from which it is isolated or recombinantly produced. Thus, an antibody that is substantially free of cellular material includes preparations of antibody having less than about 30%, 20%, 10%, or 5% (by dry weight) of heterologous protein (also referred to herein as a “contaminating protein”). When the antibody is recombinantly produced, it is also preferably substantially free of culture medium, i.e., culture medium represents less than about 20%, 10%, or 5% of the volume of the protein preparation. When the antibody is produced by chemical synthesis, it is preferably substantially free of chemical precursors or other chemicals, i.e., it is separated from chemical precursors or other chemicals which are involved in the synthesis of the protein. Accordingly such preparations of the antibody have less than about 30%, 20%, 10%, 5% (by dry weight) of chemical precursors or compounds other than the antibody of interest. In a preferred embodiment, antibodies of the invention are isolated or purified.

[0072] An “isolated” nucleic acid molecule is one which is separated from other nucleic acid molecules which are present in the natural source of the nucleic acid molecule. Moreover, an “isolated” nucleic acid molecule, such as a cDNA molecule, can be substantially free of other cellular material, or culture medium when produced by recombinant techniques, or substantially free of chemical precursors or other chemicals when chemically synthesized. In a specific embodiment, a nucleic acid molecule(s) encoding an antibody of the invention is isolated or purified.

[0073] The term “lower respiratory” tract refers to the major passages and structures of the lower respiratory tract including the windpipe (trachea) and the lungs, including the bronchi, bronchioles, and alveoli of the lungs.

[0074] As used herein, the term “low tolerance” refers to a state in which the patient suffers from side effects from a therapy so that the patient does not benefit from and/or will not continue therapy because of the adverse effects and/or the harm from side effects outweighs the benefit of the therapy.

[0075] The phrase “low to undetectable levels of aggregation” as used herein refers to samples containing no more than 5%, no more than 4%, no more than 3%, no more than 2%, no more than 1% and most preferably no more than 0.5% aggregation by weight of protein as measured by high performance size exclusion chromatography (HPSEC).

[0076] The term “low to undetectable levels of fragmentation” as used herein refers to samples containing equal to or more than 80%, 85%, 90%, 95%, 98% or 99% of the total protein, for example, in a single peak as determined by HPSEC, or in two peaks (heavy- and light-chains) by reduced Capillary Gel Electrophoresis (rCGE), representing the non-degraded antibody or a non-degraded fragment thereof, and containing no other single peaks having more than 5%, more than 4%, more than 3%, more than 2%, more than 1%, or more than 0.5% of the total protein in each. The term “reduced Capillary Gel Electrophoresis” as used herein refers to capillary gel electrophoresis under reducing conditions sufficient to reduce disulfide bonds in an antibody or fragment thereof.

[0077] As used herein, the terms “manage,” “managing,” and “management” refer to the beneficial effects that a subject derives from a therapy (e.g., a prophylactic or therapeutic agent), which does not result in a cure of the infection. In certain embodiments, a subject is administered one or more therapies (e.g., prophylactic or therapeutic agents, such as an antibody of the invention) to “manage” a RSV infection (e.g., acute RSV disease or RSV URI and/or LRI), one or more symptoms thereof, or a respiratory condition associated with, potentiated by, or potentiating a RSV infection, so as to prevent the progression or worsening of the infection.

[0078] As used herein, the term “modified antibody” encompasses any antibody described herein that comprises one or more “modifications” to the amino acid residues at given positions of the antibody constant domain (preferably an IgG and more preferably an IgGI constant domain), or FcRn-binding fragment thereof wherein the antibody has an increased in vivo half-life as compared to known anti-RSV antibodies (e.g., palivizumab) and/or as compared to the same antibody that does not comprise one or more modifications in the IgG constant domain, or FcRn-binding fragment thereof, as a result of, e.g., one or more modifications in amino acid residues identified to be involved in the interaction between the constant domain, or FcRn-binding fragment thereof (preferably, an Fc domain or hinge-Fc domain), of said antibodies and the Fc Receptor neonate (FcRn). Due to natural variations in IgG constant domain sequences (see, e.g., Kabat et al., supra), in certain instances, a first amino acid residue may be substituted with a second amino acid residue at a given position (for example, in the sequence shown in FIG. 20B, the Met at position 252 may be substituted with a Tyr) or, alternatively, the second residue may be already present in antibody at the given position, in which case substitution is not necessary (for example, the Met at position 252 remains a Met). Thus, the term “modified antibody” also encompasses antibodies that naturally comprise one or more of the recited residues at the indicated positions (e.g., the residues are already present in the recited position in the molecule without modification). Numbering of constant domain positions is according to the EU Index (Kabat et al. (1991) Sequences of proteins of immunological interest. (U.S. Department of Health and Human Services, Washington, D.C.) 5^{th} ed.). Exemplary human IgGI constant domain hinge, CH2 and CH3 regions are shown in FIG. 20B, with numbering according to the EU Index as in Kabat et al., supra. In preferred embodiments, the modified antibody comprises modifications to the amino acid residues of the Fc domain or hinge-Fc domain, most preferably of an IgGI constant domain. In some embodiments, a “modified antibody” of the invention (e.g., one that comprises a modified IgG constant domain, Fc domain, or FcRn-binding fragment thereof and has increased in vivo half-life) has increased affinity for the FcRn relative to the same antibody without a modified IgG constant domain, Fc domain, or FcRn-binding fragment thereof. In other embodiments, a modified antibody of the invention (e.g., one that comprises a modified IgG constant domain, Fc domain, or FcRn-binding fragment thereof and has increased in vivo half-life) has increased affinity for the FcRn relative to the Fc domain of palivizumab. As used herein, a “modified antibody” may or may not be a high potency, high affinity and/or high avidity modified antibody. In certain embodiments, the modified antibody is a high potency antibody, and most preferably a high potency, high affinity modified antibody. In preferred embodiments, the modified antibodies comprise a modified IgG (e.g., IgG1) constant domain, or FcRn binding fragment thereof, comprising a Tyr at position 252, a Thr at position 254, and a Glu at position 256 (“YTE”) (see FIG. 35), with numbering according to the EU Index as in Kabat et al., supra, (see also FIG. 20B).

[0079] As used herein, one or more “modifications to the amino acid residues” in the context of a constant domain, or FcRn-binding fragment thereof, of an antibody of the invention refers to any mutation, substitution, insertion or deletion of one or more amino acid residues of the sequence of the constant domain, or FcRn-binding fragment thereof (preferably, Fc domain or hinge-Fc domain) of the antibody. Preferably, the one or more modifications are substitutions. In preferred embodiments, the one or more modifications are at positions 251-256, 285-290, 308-314, 385-389, and 428-436, with numbering according to the EU Index as in Kabat et al., supra (see also FIG. 20B). In certain preferred embodiments, an IgG constant domain comprises a Y at position 252 (252Y), a T at position 254 (254T), and/or an E at position 256 (256E). Due to natural variations in IgG constant domain sequences (see, e.g., Kabat et al., supra), in certain instances, a first amino acid residue may be substituted with a second amino acid residue at a given position (for example, in the sequence shown in FIG. 20B, the Met at position 252 may be substituted with a Tyr) or, alternatively, the second residue may be already present in antibody at the given position, in which case substitution is not necessary (for example, the Met at position 252 remains a Met). Thus, discussions herein of exemplary “modifications” in an IgG constant domain, for example, 252Y, 254T, and/or 256E, are meant to encompass both molecules that naturally comprise the recited residues at the indicated positions (e.g., the residues are already present in the recited position in the molecule) and/or molecules that are modified (e.g., by amino acid substitution) to comprise the recited residues at the indicated positions. Numbering of amino acid positions used herein is according to the EU Index, as in Kabat et al. (1991) Sequences of proteins of immunological interest. (U.S. Department of Health and Human Services, Washington, D.C.) 5^{th} ed. (“Kabat et al.”).

[0080] As used herein, the term “palivizumab standard reference” and analogous terms refer to commercially available lyophilized palivizumab, as described in the Physicians' Desk Reference, 56^{th} edition, 2002. Reconstituted palivizumab may contain, e.g., the following excipients: 47 mM histidine, 3.0 mM glycine and 5.6% manitol and the active ingredient, the antibody, at a concentration of 100 milligrams per ml solution.

[0081] As used herein, the terms “peptide,” “polypeptide,” and “protein” are used to refer to amino acid sequences of various approximate lengths. For example, a peptide refers to a chain of two or more amino acids joined by peptide bonds, generally of less than about 50 amino acid residues, while a polypeptide refers to a longer chain of amino acids. In the context of a polypeptide that is a portion of a protein, the polypeptide is a chain of amino acids that is less in length than the length of the protein. It is appreciated that the terms “peptide” and “polypeptide” are not meant to refer to a precise length of a chain of amino acid residues and that in certain contexts, the two terms may be used interchangeably.

[0082] The term “pharmaceutically acceptable” as used herein means being approved by a regulatory agency of the Federal or a state government, or listed in the U.S. Pharmacopia, European Pharmacopia or other generally recognized pharmacopia for use in animals, and more particularly in humans.

[0083] The term “polyol” as used herein refers to a sugar that contains many -OH groups compared to a normal saccharide.

[0084] As used herein, the terms “prevent,” “preventing,” and “prevention” refer to the total or partial inhibition of RSV infection (e.g., acute RSV disease or RSV URI and/or LRI); the total or partial inhibition of the development or onset of disease progression of RSV from the upper respiratory tract to the lower respiratory tract and/or LRI, acute RSV disease, otitis media, and/or a symptom or respiratory condition related thereto in a subject; the total or partial inhibition of the progression of an upper respiratory tract RSV infection to a lower respiratory tract RSV infection, otitis media or a respiratory condition related thereto resulting from the administration of a therapy (e.g., a prophylactic or therapeutic agent); the total or partial inhibition of an upper and/or lower tract RSV infection, otitis media or a symptom or respiratory condition related thereto resulting from the administration of a combination of therapies (e.g., a combination of prophylactic or therapeutic agents); the total or partial inhibition of RSV infection; the total or partial inhibition of acute RSV disease.

[0085] As used herein, the term “prophylactic agent” refers to any agent that can prevent or inhibit the development or onset of disease progression of RSV from the upper to the lower respiratory tract and/or prevent or inhibit LRI, acute RSV disease, otitis media, and/or a symptom or respiratory condition relating to RSV infection in a subject; the prevention or inhibition of an upper respiratory tract RSV infection, lower respiratory tract RSV infection, acute RSV disease, otitis media, or a respiratory condition relating thereto resulting from the administration of a therapy (e.g., a prophylactic or therapeutic agent). The term also refers to preventing or inhibiting the recurrence, spread or onset of a RSV infection (e.g., acute RSV disease or RSV URI and/or LRI), otitis media, and/or a symptom or respiratory condition relating thereto (including, but not limited to, asthma, wheezing, RAD, or a combination thereof), and/or prevent the progression of an upper respiratory tract RSV infection to a lower respiratory tract RSV infection, otitis media and/or a symptom or respiratory condition related thereto. In certain embodiments, the term “prophylactic agent” refers to an antibody of the invention. In certain other embodiments, the term “prophylactic agent” refers to an agent other than an antibody of the invention. Preferably, a prophylactic agent is an agent which is known to be useful to or has been or is currently being used to prevent acute RSV disease and/or LRI or impede the onset, development, progression and/or severity of a RSV infection (preferably a RSV URI and/or LRI) otitis media, and/or a symptom or respiratory condition related thereto. In some embodiments, the prophylactic agent is a modified antibody of the invention.

[0086] In certain embodiments of the invention, a “prophylactically effective serum titer” is the serum titer in a subject, preferably a human, that prevents RSV infection in the lungs and/or that reduces the incidence of a RSV infection (e.g., acute RSV disease, or RSV URI and/or LRI), otitis media and/or a symptom or respiratory condition related thereto in said subject. The term also refers to the serum titer in a subject that prevents or inhibits the recurrence, spread or onset of a RSV URI and/or LRI, otitis media, and/or a symptom or respiratory condition relating thereto (including, but not limited to, asthma, wheezing, RAD, or a combination thereof), and/or prevents or inhibits the progression of an upper respiratory tract RSV infection to a lower respiratory tract RSV infection, otitis media and/or a symptom or respiratory condition related thereto. In some embodiments, the prophylactically effective serum titer prevents the progression of an upper respiratory tract RSV infection to a lower respiratory tract RSV infection, otitis media and/or a symptom or respiratory condition related thereto. Preferably, the prophylactically effective serum titer reduces the incidence of RSV infections in humans with the greatest probability of complications resulting from RSV infection (e.g., a human with cystic fibrosis, bronchopulmonary dysplasia, congenital heart disease, congenital immunodeficiency or acquired immunodeficiency, a human who has had a bone marrow transplant, a human infant, or an elderly human). In certain other embodiments of the invention, a “prophylactically effective serum titer” is the serum titer in a cotton rat that results in a RSV titer 5 days after challenge with 10⁵ pfu that is 99% lower than the RSV titer 5 days after challenge with 10⁵ pfu of RSV in a cotton rat not administered an antibody that immunospecifically binds to a RSV antigen.

[0087] As used herein, the term “refractory” refers to a RSV infection (e.g., acute RSV disease and/or RSV URI and/or LRI), otitis media or a respiratory condition related thereto that is not responsive to one or more therapies (e.g., currently available therapies). In a certain embodiment, a RSV infection (e.g., acute RSV disease, or RSV URI and/or LRI), otitis media or a respiratory condition related thereto is refractory to a therapy means that at least some significant portion of the symptoms associated with said RSV infection (e.g., acute RSV disease or RSV URI and/or LRI), otitis media or a respiratory condition related thereto are not eliminated or lessened by that therapy. The determination of whether a RSV infection (e.g., acute RSV disease, or RSV URI and/or LRI), otitis media or a respiratory condition related thereto is refractory can be made either in vivo or in vitro by any method known in the art for assaying the effectiveness of therapy for the infection, otitis media or the respiratory condition related thereto.

[0088] The term “RSV antigen” refers to a RSV polypeptide to which an antibody immunospecifically binds. A RSV antigen also refers to an analog or derivative of a RSV polypeptide or fragment thereof to which an antibody immunospecifically binds. In some embodiments, a RSV antigen is a RSV F antigen, RSV G antigen or a RSV SH antigen.

[0089] The term “saccharide” as used herein refers to a class of molecules that are derivatives of polyhydric alcohols. Saccharides are commonly referred to as carbohydrates and may contain different amounts of sugar (saccharide) units, e.g., monosaccharides, disaccharides and polysaccharides.

[0090] The term “serum titer” as used herein refers to an average serum titer in a population of least 10, preferably at least 20, and most preferably at least 40 subjects up to about 100, 1000 or more.

[0091] As used herein, the term “side effects” encompasses unwanted and adverse effects of a therapy (e.g., a prophylactic or therapeutic agent). Unwanted effects are not necessarily adverse. An adverse effect from a therapy (e.g., a prophylactic or therapeutic agent) might be harmful or uncomfortable or risky. Examples of side effects include, but are not limited to, URI, otitis media, rhinitis, diarrhea, cough, gastroenteritis, wheezing, nausea, vomiting, anorexia, abdominal cramping, fever, pain, loss of body weight, dehydration, alopecia, dyspenea, insomnia, dizziness, mucositis, nerve and muscle effects, fatigue, dry mouth, and loss of appetite, rashes or swellings at the site of administration, flu-like symptoms such as fever, chills and fatigue, digestive tract problems and allergic reactions. Additional undesired effects experienced by patients are numerous and known in the art. Many are described in the Physician's Desk Reference (58^{th} ed., 2004).

[0092] The term “small molecule” and analogous terms include, but are not limited to, peptides, peptidomimetics, amino acids, amino acid analogues, polynucleotides, polynucleotide analogues, nucleotides, nucleotide analogues, organic or inorganic compounds (i.e., including heterorganic and/or ganometallic compounds) having a molecular weight less than about 10,000 grams per mole, organic or inorganic compounds having a molecular weight less than about 5,000 grams per mole, organic or inorganic compounds having a molecular weight less than about 1,000 grams per mole, organic or inorganic compounds having a molecular weight less than about 500 grams per mole, and salts, esters, and other pharmaceutically acceptable forms of such compounds.

[0093] The terms “stability” and “stable” as used herein in the context of a liquid formulation comprising an antibody that immunospecifically binds to a RSV antigen refer to the resistance of the antibody in the formulation to thermal and chemical unfolding, aggregation, degradation or fragmentation under given manufacture, preparation, transportation and storage conditions. The “stable” formulations of the invention retain biological activity equal to or more than 80%, 85%, 90%, 95%, 98%, 99%, or 99.5% under given manufacture, preparation, transportation and storage conditions. The stability of the antibody can be assessed by degrees of aggregation, degradation or fragmentation by methods known to those skilled in the art, including but not limited to reduced Capillary Gel Electrophoresis (rCGE), Sodium Dodecyl Sulfate Polyacrylamide Gel Electrophoresis (SDS-PAGE) and HPSEC, compared to a reference, that is, a commercially available lyophilized palivizumab reconstituted to 100 mg/ml in 50 mM histidine/3.2 mM glycine buffer with 6% mannitol at pH 6.0. The reference regularly gives a single peak (≧97% area) by HPSEC. The overall stability of a formulation comprising an antibody that immunospecifically binds to a RSV antigen can be assessed by various immunological assays including, for example, ELISA and radioimmunoassay using the specific epitope of RSV.

[0094] As used herein, the terms “subject” and “patient” are used interchangeably. As used herein, a subject is preferably a mammal such as a non-primate (e.g., cows, pigs, horses, cats, dogs, rats, etc.) and a primate (e.g., monkey and human), most preferably a human. In one embodiment, the subject is a mammal, preferably a human, with a RSV infection (e.g., acute RSV disease, or a RSV URI and/or LRI) or otitis media. In another embodiment, the subject is a mammal, preferably a human, at risk of developing a RSV infection (e.g., acute RSV disease, or a RSV URI and/or LRI) or otitis media (e.g., an immunocompromised or immunosuppressed mammal, or a genetically predisposed mammal). In one embodiment, the subject is a human with a respiratory condition (including, but not limited to asthma, wheezing or RAD) that stems from, is caused by or associated with a RSV infection. In some embodiments, the subject is 0-5 years old or is a human infant, preferably age 0-2 years old (e.g., 0-12 months old). In other embodiments, the subject is an elderly subject.

[0095] The term “substantially free of surfactant” as used herein refers to a formulation of an antibody that immunospecifically binds to a RSV antigen, said formulation containing less than 0.0005%, less than 0.0003%, or less than 0.0001% of surfactants and/or less than 0.0005%, less than 0.0003%, or less than 0.0001% of surfactants.

[0096] The term “substantially free of salt” as used herein refers to a formulation of an antibody that immunospecifically binds to a RSV antigen, said formulation containing less than 0.0005%, less than 0.0003%, or less than 0.0001% of inorganic salts.

[0097] The term “surfactant” as used herein refers to organic substances having amphipathic structures; namely, they are composed of groups of opposing solubility tendencies, typically an oil-soluble hydrocarbon chain and a water-soluble ionic group. Surfactants can be classified, depending on the charge of the surface-active moiety, into anionic, cationic, and nonionic surfactants. Surfactants are often used as wetting, emulsifying, solubilizing, and dispersing agents for various pharmaceutical compositions and preparations of biological materials.

[0098] As used herein, the term “therapeutic agent” refers to any agent that can be used in the treatment, management or amelioration of a RSV infection (e.g., acute RSV disease or a RSV URI and/or LRI), otitis media or a symptom or a respiratory condition related thereto (e.g., asthma, wheezing and/or RAD). In certain embodiments, the term “therapeutic agent” refers to an antibody of the invention. In certain other embodiments, the term “therapeutic agent” refers to an agent other than an antibody of the invention. Preferably, a therapeutic agent is an agent which is known to be useful for, or has been or is currently being used for the treatment, management or amelioration of a RSV infection (e.g., acute RSV disease and/or a RSV URI and/or LRI), otitis media, or one or more symptoms or respiratory conditions related thereto. In certain embodiments, the therapeutic agent is a modified antibody of the invention.

[0099] The term “synergistic” as used herein refers to a combination of therapies (e.g., use of prophylactic or therapeutic agents) which is more effective than the additive effects of any two or more single therapy. For example, a synergistic effect of a combination of prophylactic or therapeutic agents permits the use of lower dosages of one or more of the agents and/or less frequent administration of said agents to a subject with a RSV infection. The ability to utilize lower dosages of prophylactic or therapeutic therapies and/or to administer said therapies less frequently reduces the toxicity associated with the administration of said therapies to a subject without reducing the efficacy of said therapies in the prevention, management, treatment or amelioration of a RSV infection (e.g., acute RSV disease, or a RSV URI and/or LRI), otitis media, or a symptom or respiratory condition relating thereto (including, but not limited to, asthma, wheezing, RAD, or a combination thereof). In addition, a synergistic effect can result in improved efficacy of therapies in the prevention, management, treatment or amelioration of a RSV infection (e.g., acute RSV disease, or a RSV URI and/or LRI), otitis media, or a symptom or respiratory condition relating thereto (including, but not limited to, asthma, wheezing, RAD, or a combination thereof). Finally, synergistic effect of a combination of therapies (e.g., prophylactic or therapeutic agents) may avoid or reduce adverse or unwanted side effects associated with the use of any single therapy.

[0100] In certain embodiments of the invention, a “therapeutically effective serum titer” is the serum titer in a subject, preferably a human, that reduces the severity, the duration and/or the symptoms associated with a RSV infection (e.g., acute RSV disease or RSV URI and/or LRI) in said subject. Preferably, the therapeutically effective serum titer reduces the severity, the duration and/or the number symptoms associated with a RSV infection (e.g., acute RSV disease or RSV URI and/or LRI) in humans with the greatest probability of complications resulting from the infection (e.g., a human with cystic fibrosis, bronchopulmonary dysplasia, congenital heart disease, congenital immunodeficiency or acquired immunodeficiency, a human who has had a bone marrow transplant, a human infant, or an elderly human). In certain other embodiments of the invention, a “therapeutically effective serum titer” is the serum titer in a cotton rat that results in a RSV titer 5 days after challenge with 10⁵ pfu that is 99% lower than the RSV titer 5 days after challenge with 10⁵ pfu of RSV in a cotton rat not administered an antibody that immunospecifically binds to a RSV antigen.

[0101] As used herein, the term “therapy” refers to any protocol, method and/or agent that can be used in the prevention, management, treatment and/or amelioration of a RSV infection (e.g., acute RSV disease, or a RSV URI and/or LRI), otitis media, or a symptom or respiratory condition relating thereto (including, but not limited to, asthma, wheezing, RAD, or a combination thereof). In certain embodiments, the terms “therapies” and “therapy” refer to a biological therapy, supportive therapy, and/or other therapies useful in the prevention, management, treatment and/or amelioration of a RSV infection (e.g., acute RSV disease, or a RSV URI and/or LRI), otitis media, or a symptom or respiratory condition relating thereto (including, but not limited to, asthma, wheezing, RAD, or a combination thereof) known to one of skill in the art such as medical personnel.

[0102] As used herein, the terms “treat,” “treatment” and “treating” refer to the reduction or amelioration of the progression, severity, and/or duration of a RSV infection (e.g., acute RSV disease, or a RSV URI and/or LRI), otitis media, or a symptom or respiratory condition relating thereto (including, but not limited to, asthma, wheezing, RAD, or a combination thereof) resulting from the administration of one or more therapies (including, but not limited to, the administration of one or more prophylactic or therapeutic agents, such as an antibody of the invention). In specific embodiments, such terms refer to the reduction or inhibition of the replication of RSV, the inhibition or reduction in the spread of RSV to other tissues or subjects (e.g., the spread to the lower respiratory tract), the inhibition or reduction of infection of a cell with a RSV, the inhibition or reduction of acute RSV disease, the inhibition or reduction of otitis media, the inhibition or reduction of the progression from a LRI to URI, the inhibition or reduction of a respiratory condition caused by or associated with RSV infection (e.g., asthma, wheezing and/or RAD), and/or the inhibition or reduction of one or more symptoms associated with a RSV infection.

[0103] The term “upper respiratory” tract refers to the major passages and structures of the upper respiratory tract including the nose or nostrils, nasal cavity, mouth, throat (pharynx), and voice box (larynx).

[0104] The term “very little to no loss of the biological activities” as used herein refers to antibody activities, including specific binding abilities of antibodies to a RSV antigen as measured by various immunological assays, including, but not limited to ELISAs and radioimmunoassays. In one embodiment, the antibodies of the formulations of the invention retain approximately 50%, preferably 55%, 60%, 65%, 70%, 75%, 80%, 85%, 90%, 95% or 98% of the ability to immunospecifically bind to a RSV antigen as compared to a reference antibody (e.g., palivizumab) as measured by an immunological assay known to one of skill in the art or described herein. For example, an ELISA based assay may be used to compare the ability of an antibody to immunospecifically bind to a RSV antigen to a palivizumab reference standard. In this assay, plates are coated with a RSV antigen and the binding signal of a set concentration of a palivizumab reference standard is compared to the binding signal of the same concentration of a test antibody.

### 4. DESCRIPTION OF THE FIGURES

[0105] FIG. 1A-1B show the amino acid sequences of the (A) light chain variable region and (B) heavy chain variable region of a monoclonal antibody that binds to a RSV antigen, the potency of which can be increased by methods described herein or in Applicants' copending applications Ser. Nos. 60/168,426 and 60/186,252 and U.S. Pat. No. 6,656,467. For reference purposes, this is the amino acid sequence of the palivizumab antibody disclosed in Johnson et al., 1997, J. Infect. Dis. 176:1215-1224 and U.S. Pat. No. 5,824,307. Here, the CDR regions are underlined while non-underlined residues form the framework (FR) regions of the variable regions of the antibody. In this antibody, the CDRs are derived from a mouse antibody while the framework regions are derived from a human antibody. The constant regions (not shown) are also derived from a human antibody.

[0106] FIG. 2A-2B show the (A) light chain variable region and (B) heavy light chain variable region for an antibody sequence. CDR regions are underlined, and the non-underlined residues form the framework of the variable regions of the antibody. This sequence differs from the sequence disclosed in FIGS. 1A-1B in the first 4 residues of VH CDR1 of the light chain, residue 103 of the light chain FR4 and residue 112 of the heavy chain FR4. For reference purposes, these VL and VH sequences are identical to the VL and VH domains of IX-493L1FR (see Table 2).

[0107] FIG. 3 summarizes the results of a RSV microneutralization assay using the anti-RSV antibodies A4B4L1FR-S28R (MEDI-524) and palivizumab, comparing the ability of both antibodies to inhibit the in vitro replication of RSV (Long) in the assay.

[0108] FIG. 4 summarizes the results of a RSV microneutralization assay demonstrating the ability of A4B4L1FR-S28R (MEDI-524) to inhibit the in vitro replication of RSV (Long) in the microneutralization assay.

[0109] FIG. 5A-5B summarize the results of experiments demonstrating the ability of A4B4L1FR-S28R (MEDI-524) to inhibit the in vivo replication of RSV (Long) in the upper and/or lower respiratory tract of cotton rats, in significantly lower doses than a known anti-RSV antibody, palivizumab.

[0110] FIG. 6A-6B show an amino acid sequence comparison of the (A) VH and (B) VL regions of palivizumab, 493L1FR, AFFF(1), and A4b4. CDR regions, as indicated in Kabat et al. (1991) Sequences of proteins of immunological interest. (U.S. Department of Health and Human Services, Washington, D.C.) 5^{th} ed., are in italics. Mutations decreasing k_{off} are labeled in gray, and mutations increasing kₒₙ are underlined.

[0111] FIG. 7A-7B show beneficial k_{off} and kₒₙ mutations (highlighted in bold). (A) Single mutations in 493L1FR that result in increased affinity to F protein due to the reduction in koff. (B) Single mutations in AFFF(1), the best koff-improved palivizumab variant, that result in increased affinity to F protein due to the increase in kₒₙ. AFFF(1) contains four beneficial k_{off} mutations which are circled in gray.

[0112] FIG. 8A-8D show the results of palivizumab and its variants derived from (A)-(B) viral inhibition assays, and (C)-(D) ELISA assays. (A) Titration of 493L1FR and k_{off}-improved palivizumab Fab variants on immobilized RSV F protein. (B) Inhibition of the binding of k_{off}-improved Fab variants to F protein by palivizumab IgG. In both (A) and (B), bacterial periplasmic extracts containing Fab variants AFFF(1) (□), AFSF (▴), S32A (⋄), 493L1FR (▪), and an irrelevant Fab (◯) were tested as described in Materials and Methods. For the inhibition study, Fab molar ratio of the palivizumab IgG (two Fabs per molecule) to Fab variants was plotted at x-axis. (C) Titration of palivizumab Fab and its kₒₙ-improved Fab variants on immobilized RSV F protein. (D) Inhibition of the binding of kₒₙ-improved Fab variants to F protein by palivizumab IgG. In both (C) and (D), purified Fab variants A4b4 (Δ), A12a6 (●), palivizumab Fab (♦), and an irrelevant Fab (◯) were tested.

[0113] FIG. 9A-9D show RSV neutralization curves of palivizumab and its variants derived from a microneutralization assay. Several k_{off}-improved variants in the Fab (A) or IgG (B) format were measured for their abilities to inhibit RSV replication in HEp-2 cells. Variants AFFF(1) (□), AFSF (▴), AFFG (Δ), palivizumab (▪), and BSA (◯) were titrated. Several kₒₙ-improved variants as Fab (C) or IgG (D) were also measured. Variant Ale9 (Δ), A13c4 (♦), A12a6 (□), A4b4 (⋄), and palivizumab (▪) were titrated.

[0114] FIG. 10A-10D show a summary of the beneficial effects of k_{off}, kₒₙ and bivalence of the antibody on RSV neutralization as indicated by the reduction in IC₅₀ as determined in a microneutralization assay. (A) Comparison of the IC₅₀ of palivizumab Fab with its k_{off}-improved Fab variants. In Fab format, a strong correlation was observed between the IC₅₀ and k_{off}. Combinatorial k_{off} variants with two log reduction in k_{off} have ˜300-fold improvements in the ability to neutralize virus compared with palivizumab. (B) Conversion to IgG of palivizumab and its k_{off}-improved variants. The bivalent binding effect has increased significantly the ability to neutralize virus for the palivizumab and its single k_{off} mutation variants, but not the combinatorial k_{off} variants. The IC₅₀ values of palivizumab IgG and all of its k_{off}-variants converge at ˜3 nM. (C) The IC₅₀ of the combinatorial kₒₙ Fab variants. These variants have ˜4- to 5-fold improvements in kₒₙ, which resulted in substantial enhancements in viral neutralization compared with palivizumab. The differences in IC₅₀ among these kₒₙ variants are in part due to their differences in k_{off}. One outlier with a k_{off} of 2.19×10⁴ s⁻¹ is not included. (D) Conversion to IgG of the combinatorial kon-improved variants. Upon conversion to IgG, the IC₅₀ values of all the combinatorial kₒₙ variants converge at ˜0.1-0.2 nM, despite their differences observed in Fab formats. This bivalent effect was similarly observed in k_{off} variants. Overall, the kₒₙ improvement resulted in a 15- to 30-fold enhancement in viral neutralization compared with palivizumab IgG.

[0115] FIG. 11A-11D show comparative binding of palivizumab and one each of its best k_{off} and kₒₙ variants to affinity-purified F protein and to F protein on RSV-infected cells. Purified palivizumab (▪), AFFF(1) (k_{off}-improved; □), A4b4 (kₒₙ-improved; ♦) and an irrelevant antibody (◯) in the (A) Fab or (B) IgG format were measured for their binding to purified F protein immobilized at 100 ng/ml on IMMULON-1 plates. The same antibodies in the (C) Fab or (D) IgG format were also measured for their binding to F protein on acetone-fixed HEp-2 cells (1×10³ cells/well) infected with RSV Long strain.

[0116] FIG. 12 shows binding of IgGs of palivizumab and one each of its best k_{off} and kₒₙ variants to F protein on the surface of RSV-infected cells as measured by flow cytometry. After infection, HEp-2 cells were stained for RSV F protein with palivizumab, AFFF(1) (k_{off} variant) and A4b4 (kₒₙ variant) at 3 μg/ml, respectively.

[0117] FIG. 13A-13B show the nucleotide and translated amino acid sequence of the MEDI-524 (A) VH domain (SEQ ID NO:48) and (B) VL domain (SEQ ID NO:11). CDR sequences are underlined. Where palivizumab differs from MEDI-524, the palivizumab amino acid is shown below the MEDI-524 sequence. Residues that were introduced on the IX-493L1FR template (see also FIG. 2) are indicated in bold.

[0118] FIG. 14 shows the mean serum levels after a single IV dose of 3 mg/kg, 15 mg/kg or 30 mg/kg in healthy adults.

[0119] FIG. 15 shows the mean serum MEDI-524 trough concentrations during monthly IM injections of 15 mg/kg in a human clinical trial. Concentrations ≧30 μg/mL were maintained throughout dosing in ≧90% of children and increased with continued dosing as expected.

[0120] FIG. 16 shows the pharmacokinetic profile of MEDI-524 in nasal secretions following a single IV dose of 3 mg/kg, 15 mg/kg or 30 mg/kg of MEDI-524 or a placebo in children with RSV lower respiratory tract infections. The percent of subjects with MEDI-524 in nasal washes was directly proportional to the amount of MEDI-524 received.

[0121] FIG. 17 shows RSV viral titers in nasal secretions of children treated with MEDI-524 or placebo with the indicated doses at days 0, 1 and 2 post-dose. Participants who received MEDI-524 (groups pooled) experienced a significant decrease in mean log₁₀ PFU/mL between Study Day 0 and 1 compared to placebo recipients (Mean=−2.6, SD=1.6, vs. −0.9, SD=1.7; p<0.05).

[0122] FIG. 18 shows the percentage of participants with RSV in nasal secretions recovered from tissue culture at days 0, 1, and 2 post-dose. There was a statistically significant decrease in RSV in nasal secretions recovered from tissue culture in MEDI-524 as compared to placebo-treated patients, which indicates biological activity of MEDI-524 in the upper respiratory tract.

[0123] FIG. 19 shows the structure of the IgG hinge-Fc region indicating the locations of the residues identified to be involved in the interaction with the FcRn receptor (Ghetie et al., Immunology Today, 18(12):592-598, 1997).

[0124] FIG. 20A shows the amino acid sequence of the human IgG1 hinge-Fc region (SEQ ID NO:342) containing a hinge region (SEQ ID NO:341), CH2 domain (SEQ ID NO:339), and CH3 domain (SEQ ID NO:340).

[0125] FIG. 20B is similar to FIG. 20A, except that the amino acid residues are renumbered according to the EU Index as in Kabat et al., supra. Bolded regions are preferred embodiment regions of amino acid modifications (see Section 5.1.1).

[0126] FIGS. 21A-21B show the amino acid sequences of (A) human FcRn (SEQ ID NO:337) and (B) mouse FcRn (SEQ ID NO:338), respectively.

[0127] FIG. 22 shows the amino acid sequence of the human IgGI hinge-Fc region (SEQ ID NO:342), in which wild-type residues which are mutated by amino acid substitutions are indicated in underlined bold-face.

[0128] FIG. 23 shows a schematic diagram of panning process for the phage-displayed modified hinge-Fc library.

[0129] FIG. 24 shows a summary of the occurrence of selected mutant residues at the variant positions in the libraries screened.

[0130] FIGS. 25A-25D. (A) shows the binding of murine FcRn to immobilized IgGI having M252Y/S254T/T256E substitutions. Murine FcRn was injected at 10 different concentrations ranging from InM to 556 nM over a surface on which 4000 resonance units (RU) of IgG1 had been coupled. After equilibrium was reached, residual bound protein was eluted with a pulse of PBS, pH 7.4. (B) shows the binding of human FcRn to immobilized IgG1/M252Y/S254T/T256E. Murine FcRn was injected at 8 different concentrations ranging from 71 nM to 2.86 μM over a surface on which 1000 RU of IgG1 had been coupled. After equilibrium was reached, residual bound protein was eluted with a pulse of PBS, pH 7.4. (C) and (D) show scatchard analyses of the data in (A) and (B), respectively, after correction for nonspecific binding. Req is the corrected equilibrium response at a given concentration, C. The plots are linear with correlation coefficients of 0.97 and 0.998, respectively. The apparent K_{d} are 24 nM and 225 rnM, respectively.

[0131] FIGS. 26A-26H. (A)-(D) show the results from BIAcore analysis of the binding of murine FcRn at pH 6.0 and pH 7.4 to (A) wild type human IgG1, (B) M252Y/S254T/T256E, (C) H433K/N434F/Y436H, and (D) G385D/G386P/N389S, respectively, after correction for nonspecific binding. Murine FcRn was injected at a concentration of 1.1 μm over a surface on which 1000 RU of wild type IgG1, 1000 RU of M252Y/S254T/T256E, 955 RU of H433K/N434F/Y436H, and 939 RU of G385D/Q386P/N389S had been coupled. (E)-(H) show the results from BIAcore analysis of the binding of human FcRn at pH 6.0 and pH 7.4 to (E) wild type human IgG1, (F) M252Y/S254T/T256E, (G) H433K/N434F/Y436H, and (H) G385D/Q386P/N389S, respectively, after correction for nonspecific binding. Human FcRn was injected at a concentration of 1.4 μm over a surface on which 1000 RU of wild type IgG1, 1000 RU of M252Y/S254T/T256E, 955 RU of H433K/N434F/Y436H, and 939 RU of G385D/Q386PIN389S had been coupled.

[0132] FIG. 27 shows the space-filling model of the surface of the Fc fragment of a human IgG1 based upon the human IgG1 structure of Deisenhofer, 1981, Biochemistry 20:2361-2370. Residues are color-coded according to the gain of free energy of stabilization of the Fc-FcRn complex: red, substitutions at these positions were found to increase affinity by a factor of at least 2.5 times in the Fc/human FcRn interaction and of at least 5 time in the Fc/mouse FcRn interaction; blue, substitutions at those positions were found to increase affinity by a factor of less than 2 times in both the Fc-human FcRn and Fc-mouse FcRn interaction. The figure was drawn using Swiss pdb viewer (Guex and Peitsch, 1997, Electrophoresis 18:2714-2723).

[0133] FIG. 28 shows the changes in serum concentration ([Mab] ng/ml) over time (in days) of antibody having a wild type constant domain (palivizumab) (open squares), or constant domains with the following mutations: M252Y/S254T/T256E (open circles), G385D/Q386P/N389S (solid squares), and H433K/N434F/Y436H (solid circles). Antibody concentration was determined using anti-human IgG ELISA.

[0134] FIGS. 29A-29D shows the nucleotide and amino acid sequences of the heavy chain of MEDI-524 and MEDI-524-YTE. (A) shows the nucleotide sequence of the heavy chain of MEDI-524. (B) shows the amino acid sequence of the heavy chain of MEDI-524. (C) shows the nucleotide sequence of the heavy chain of MEDI-524-YTE, wherein the nucleotide sequence corresponding to the M252Y/S254T/T256E modifications are underlined. (D) shows the amino acid sequence of the heavy chain of MEDI-524-YTE, wherein the M252Y/S254T/T256E modifications are underlined.

[0135] FIG. 30 shows BIAcore analysis of the binding of human and Cynomolgus Monkey FcRn at pH 6.0 and pH 7.4 to MEDI-524-YTE. Human and Cynomolgus Monkey FcRn were injected at a concentration of 243 nM over a surface on which ˜1220 RU of MEDI-524-YTE had been coupled.

[0136] FIG. 31 shows the results of a RSV microneutralization assay of MEDI-524 and MEDI-524-YTE.

[0137] FIG. 32 shows clearance curves of MEDI-524 and MEDI-524-YTE following intravenous injection at 30 mg/kg in Cynomolgus Monkeys. Each time point represents the average serum concentration for ten animals. Standard deviations are indicated by error bars.

[0138] FIG. 33 shows human skin and lung tissue cross-reactivity with A4B4 antibody but not with MEDI-524 or an isotype control antibody.

[0139] FIG. 34 is a schematic diagram showing the outline for preparing purified antibodies that immunospecifically bind to a RSV antigen.

[0140] FIG. 35 shows the amino acid sequence of the,VH chain of A4B4L l FR-S28R (SEQ ID NO: 254) comprising M252Y/S254T/T256E modifications in the IgG1 constant domain (MEDI-524-YTE).

### 5. DETAILED DESCRIPTION OF THE INVENTION

[0141] The present invention provides antibodies with a high affinity and/or high avidity for a RSV antigen, such as RSV F antigen that are effective in reducing upper as well as lower respiratory tract RSV infections at dosages less than or about equal to the dosage of palivizumab used to prevent only lower respiratory tract infections.

[0142] Additionally, the present invention provides an antibody with high affinity and/or high avidity for a RSV antigen (e.g., RSV F antigen) for the prevention, treatment and/or amelioration an upper respiratory tract RSV infection (URI) and/or lower respiratory tract RSV infection (LRI), wherein the antibody comprises one or more amino acid modifications in the IgG constant domain, or FcRn-binding fragment thereof (preferably a modified Fc domain or hinge-Fc domain) that increases the in vivo half-life of the IgG constant domain, or FcRn-binding fragment thereof (e.g., Fc or hinge-Fc domain), and any molecule attached thereto, and increases the affinity of the IgG, or FcRn-binding fragment thereof containing the modified region, for FcRn (i.e., a “modified antibody”). The amino acid modifications may be any modification of a residue (and, in some embodiments, the residue at a particular position is not modified but already has the desired residue), preferably at one or more of residues 251-256, 285-290, 308-314, 385-389, and 428-436, wherein the modification increases the affinity of the IgG, or FcRn-binding fragment thereof containing the modified region, for FcRn. In other embodiments, the antibody comprises a tyrosine at position 252 (252Y), a threonine at position 254 (254T), and/or a glutamic acid at position 256 (256E) (numbering of the constant domain according to the EU index in Kabat et al. (1991). Sequences of proteins of immunological interest. (U.S. Department of Health and Human Services, Washington, D.C.) 5^{th} ed. (“Kabat et al.”)) in the constant domain, or FcRn-binding fragment thereof. In other embodiments, the antibodies comprise 252Y, 254T, and 256E (see EU index in Kabat et al., supra) in the constant domain, or FcRn-binding fragment thereof (hereafter “YTE” see, e.g., FIG. 35).

[0143] The present invention provides methods of preventing, managing, treating, neutralizing, and/or ameliorating a RSV infection (e.g., acute RSV disease, or a RSV URI and/or LRI) in a subject comprising administering to said subject an effective amount of an antibody provided herein (a modified or unmodified antibody) which immunospecifically binds to a RSV antigen with high affinity and/or high avidity. Because a lower and/or longer-lasting serum titer of the antibodies of the invention will be more effective in the prevention, management, treatment and/or amelioration of a RSV infection (e.g., acute RSV disease, or a RSV URI and/or LRI) than the effective serum titer of known antibodies (e.g., palivizumab), lower and/or fewer doses of the antibody can be used to achieve a serum titer effective for the prevention, management, treatment and/or amelioration of a RSV infection (e.g., acute RSV disease, or a RSV URI and/or LRI), for example one or more doses per RSV season. The use of lower and/or fewer doses of an antibody of the invention that immunospecifically binds to a RSV antigen reduces the likelihood of adverse effects and are safer for administration to, e.g., infants, over the course of treatment (for example, due to lower serum titer, longer serum half-life and/or better localization to the upper respiratory tract and/or lower respiratory tract as compared to known antibodies (e.g., palivizumab). In certain embodiments, an antibody is administered once or twice per RSV season.

[0144] Accordingly, the invention provides antibodies, and methods of using the antibodies thereof, having an increased potency and/or that have increased affinity and/or increased avidity for a RSV antigen (preferably RSV F antigen) as compared to a known RSV antibody (e.g., palivizumab). In some embodiments, the antibody comprises a modified IgG constant domain, or FcRn-binding fragment thereof (preferably, Fc domain or hinge-Fc domain), which results in increased in vivo serum half-life, as compared to, for example, antibodies that do not comprise a modified IgG constant domain, or FcRn-binding fragment thereof (e.g., as compared to the same antibody that does not comprise one or more modifications in the IgG constant domain, or Fc-binding fragment thereof (i.e., the same, unmodified antibody), or as compared to another RSV antibody, such as palivizumab). In some embodiments, the antibodies are administered to a subject, wherein the subject is human subject. In certain embodiments, the subject is in need of therapy thereof. In some embodiments, the subject subjectively knows that he or she is in need or therapy. In other embodiments, the subject does not subjectively know that he or she is in need of therapy.

[0145] In a specific embodiment, the invention provides a method of preventing, managing, treating and/or ameliorating a RSV infection (e.g., acute RSV disease, or a RSV URI and/or LRI), otitis media (preferably, stemming from, caused by or associated with a RSV infection, such as a RSV URI and/or LRI), and/or a symptom or respiratory condition relating thereto (e.g., asthma, wheezing, and/or RAD), the method comprising administering to a subject an effective amount of an antibody described herein, for example a modified or unmodified antibody (i.e., an antibody of the invention). In another embodiment, the invention provides a method of preventing, managing, treating and/or ameliorating an acute RSV disease, or progression to an acute RSV disease, the method comprising administering to a subject an effective amount of an antibody of the invention. In some embodiments, the symptom or respiratory condition relating to the RSV infection is asthma, wheezing, RAD, nasal congestion, nasal flaring, cough, tachypnea (rapid coughing), shortness of breath, fever, croupy cough, or a combination thereof. In some embodiments, both upper and lower respiratory tract RSV infections are prevented, treated, managed, and/or ameliorated. In preferred embodiments, the progression from an upper respiratory tract infection to a lower respiratory tract infection is prevented, treated, managed, and/or ameliorated. In other preferred embodiments, acute RSV disease, or the progression to an acute RSV disease, is prevented, treated, managed, and/or ameliorated.

[0146] In a specific embodiment, the invention provides a method of preventing, managing, treating and/or ameliorating a RSV infection (e.g., acute RSV disease, or a RSV URI and/or LRI), otitis media (preferably, stemming from, caused by or associated with a RSV infection, such as a RSV URI and/or LRI), and/or a symptom or respiratory condition relating thereto (e.g., asthma, wheezing, and/or RAD), the method comprising administering to a subject an effective amount of an antibody of the invention. In another embodiment, the invention provides a method of preventing, managing, treating and/or ameliorating a RSV infection (e.g., acute RSV disease, or a RSV URI and/or LRI), otitis media (preferably, stemming from, caused by or associated with a RSV infection, such as a RSV URI and/or LRI), and/or a symptom or respiratory condition relating thereto (e.g., asthma, wheezing, and/or RAD), the method comprising administering to a subject an effective amount of an antibody of the invention and an effective amount of a therapy other than an antibody of the invention. Preferably, such a therapy is useful in the prevention, management, treatment and/or amelioration of a RSV infection (preferably an acute RSV disease, or a RSV URI and/or LRI) or otitis media. In a preferred embodiment, the otitis media prevented, treated, managed and/or ameliorated in accordance with the methods of the invention stems from, is caused by or is associated with a RSV infection, preferably a RSV URI and/or LRI.

[0147] The present invention provides methods for preventing, managing, treating and/or ameliorating a RSV infection (e.g., acute RSV disease, or a RSV URI and/or LRI), otitis media (preferably, stemming from, caused by or associated with a RSV infection, such as a RSV URI and/or LRI), and/or a symptom or respiratory condition relating thereto (e.g., asthma, wheezing, and/or RAD) in a subject, said methods comprising administering to said subject at least a first dose of an antibody of the invention so that said subject has a serum antibody titer of from about 0.1 μg/ml to about 800 μg/ml, such as between 0.1 μg/ml and 500 μg/ml, 0.1 μg/ml and 250 μg/ml, 0.1 μg/ml and 100 μg/ml, 0.1 μg/ml and 50 μg/ml, 0.1 μg/ml and 25 μg/ml or 0.1 μg/ml and 10 μg/ml. In certain embodiments, the serum antibody titer is at least 0.1 μg/ml, at least 0.2 μg/ml, at least 0.4 μg/ml, at least 0.6 μg/ml, at least 0.8 μg/ml, at least 1 μg/ml, at least 1.5 μg/ml, at least 2 μg/ml, at least 5 μg/ml, at least 10 μg/ml, at least 15 μg/ml, at least 20 μg/ml, at least 25 μg/ml, at least 30 μg/ml, at least 35 μg/ml, at least 40 μg/ml, at least 45 μg/ml, at least 50 μg/ml, at least 55 μg/ml, at least 60 μg/ml, at least 65 μg/ml, at least 70 μg/ml, at least 75 μg/ml, at least 80 μg/ml, at least 85 μg/ml, at least 90 μg/ml, at least 95 μg/ml, at least 100 μg/ml, at least 105 μg/ml, at least 110 μg/ml, at least 115 μg/ml, at least 120 μg/ml, at least 125 μg/ml, at least 130 μg/ml, at least 135 μg/ml, at least 140 μg/ml, at least 145 μg/ml, at least 150 μg/ml, at least 155 μg/ml, at least 160 μg/ml, at least 165 μg/ml, at least 170 μg/ml, at least 175 μg/ml, at least 180 μg/ml, at least 185 μg/ml, at least 190 μg/ml, at least 195 [g/ml, or at least 200 μg/ml, at least 250 μg/ml, at least 300 μg/ml, at least 350 μg/ml, at least 400 μg/ml, at least 450 μg/ml, at least 500 μg/ml, at least 550 μg/ml, at least 600 μg/ ml, at least 650 μg/ml, at least 700 μg/ml, at least 750 μg/ml, or at least 800 μg/ml. In one embodiment, a prophylactically or therapeutically effective dose results in a serum antibody titer of approximately 75 μg/ml or less, approximately 60 μg/ml or less, resulting in a serum antibody titer of approximately 50 μg/ml or less, approximately 45 μg/ml or less, approximately 30 μg/ml or less, and preferably at least 2 μg/ml, more preferably at least 4 μg/ml, and most preferably at least 6 μg/ml. The antibody of the invention may or may not comprise a modified IgG (e.g., IgG1) constant domain, or FcRn-binding fragment thereof (e.g., Fc or hinge-Fc domain). In certain embodiments, the antibody is a modified antibody, and preferably the antibody comprises an IgG constant domain comprising YTE (e.g., MEDI-524 YTE).

[0148] In some embodiments the aforementioned serum antibody concentrations are present in the subject at about or for about 12 to 24 hours after the administration of the first dose of the antibody of the invention and prior to the optional administration of a subsequent dose. In some embodiments, the aforementioned serum antibody concentrations are present for a certain amount of days after the administration of the first dose of the antibody and prior to the optional administration of a subsequent dose, wherein said certain number of days is from about 20 days to about 180 days (or longer), such as between 20 days and 90 day, 20 days and 60 days, or 20 days and 30 days, and in certain embodiments is at least 20 days, at least 25 days, at least 30 days, at least 35 days, at least 40 days, at least 45 days, at least 50 days, at least 60 days, at least 75 days, at least 90 days, at least 105 days, at least 120 days, at least 135 days, at least 150 days, at least 165 days, at least 180 days or longer. In certain embodiments, the first dose of the antibody resulting in the aforementioned serum antibody concentrations is about 60 mg/kg or less, about 50 mg/kg or less, about 45 mg/kg or less, about 40 mg/kg or less, about 30 mg/kg or less, about 20 mg/kg or less, about 15 mg/kg or less, about 10 mg/kg or less, about 5 mg/kg or less, about 4 mg/kg or less, about 3 mg/kg, about 2 mg/kg or less, about 1.5 mg/kg or less, about 1.0 mg/kg or less, about 0.80 mg/kg or less, about 0.40 mg/kg or less, about 0.20 mg/kg or less, about 0.10 mg/kg or less, about 0.05 mg/kg or less, or about 0.025 mg/kg or less. In some embodiments, the first dose of an antibody of the invention is a prophylactically or therapeutically effective dose that results in any one of the aforementioned serum antibody concentrations. In one embodiment, the first dose of an antibody of the invention is administered in a sustained release formulation and/or by intranasal or pulmonary delivery. The antibody of the invention may or may not comprise a modified IgG (e.g., IgG1) constant domain, or FcRn-binding fragment thereof (e.g., Fc or hinge-Fc domain). In certain embodiments, the antibody is a modified antibody, and preferably comprises the YTE modification (e.g., MEDI-524 YTE).

[0149] The present invention also provides methods for preventing, managing, treating and/or ameliorating a RSV infection (e.g., acute RSV disease, or a RSV URI and/or LRI), otitis media (preferably, stemming from, caused by or associated with a RSV infection, such as a RSV URI and/or LRI), and/or a symptom or respiratory condition relating thereto (e.g., asthma, wheezing, and/or RAD) in a subject, said methods comprising administering to said subject a first dose of an antibody of the invention so that said subject has a reduced RSV viral lung titer and/or RSV viral sputum titer (as determined using methods described herein (e.g., Example 6.9) or otherwise known in the art) as compared to a negative control, for example a subject receiving a placebo, as compared to the tiers in a subject prior to administration of the first dose of an antibody of the invention, or as compared to a subject receiving another RSV antibody (e.g., palivizumab). In embodiments, wherein the antibody is a modified antibody of the invention, the reduced RSV viral lung tier and/or RSV viral sputum titer may further be compared to a subject receiving the same antibody without the modifications in the IgG constant domain.

[0150] The present invention also provides methods for preventing, managing, treating and/or ameliorating a RSV infection (e.g., acute RSV disease, or a RSV URI and/or LRI), otitis media (preferably, stemming from, caused by or associated with a RSV infection, such as a RSV URI and/or LRI), and/or a symptom or respiratory condition relating thereto (e.g., asthma, wheezing, and/or RAD) in a subject, said methods comprising administering to said subject a first dose of an antibody of the invention so that said subject has a nasal turbinate and/or nasal secretion antibody concentration of from about 0.01 μg/ml to about 2.5 μg/ml (or more). In certain embodiments, the nasal turbinate and/or nasal secretion antibody concentration is at least 0.01 μg/ml, at least 0.011 μg/ml, at least 0.012 μg/ml, at least 0.013 μg/ml, at least 0.014 μg/ml, at least 0.015 μg/ml, at least 0.016 μg/ml, at least 0.017 μg/ml, at least 0.018 μg/ml, at least 0.019 μg/ml, at least 0.02 μg/ml, at least 0.025 μg/ml, at least 0.03 μg/ml, at least 0.035 μg/ml, at least 0.04 μg/ml, at least 0.05 μg/ml, at least 0.06 μg/ml, at least 0.07 μg/ml, at least 0.08 μg/ml, at least 0.09 μg/ml, at least 0.1 μg/ml, at least 0.11 μg/ml, at least 0.115 μg/ml, at least 0.12 μg/ml, at least 0.125 μg/ml, at least 0.13 μg/ml, at least 0.135 μg/ml, at least 0.14 μg/ml, at least 0.145 μg/ml, at least 0.15 μg/ml, at least 0.155 μg/ml, at least 0.16 μg/ml, at least 0.165 μg/ml, at least 0.17 μg/ml, at least 0.175 μg/ml, at least 0.18 μg/ml, at least 0.185 μg/ml, at least 0.19 μg/ml, at least 0.195 μg/ml, at least 0.2 μg/ml, at least 0.3 μg/ml, at least 0.4 μg/ml, at least 0.5 μg/ml, at least 0.6 μg/ml, at least 0.7 μg/ml, at least 0.8 μg/ml, at least 0.9 μg/ml, at least 1.0 μg/ml, at least 1.1 μg/ml, at least 1.2 μg/ml, at least 1.3 μg/ml, at least 1.4 μg/ml, at least 1.5 μg/ml, at least 1.6 μg/ml, at least 1.7 μg/ml, at least 1.8 μg/ml, at least 1.9 μg/ml, at least 2.0 μg/ml, at least 2.1 μg/ml, at least 2.2 μg/ml, at least 2.3 μg/ml, at least 2.4 μg/ml, at least 2.5 μg/ml or more. The antibody of the invention may or may not comprise a modified IgG (e.g., IgG1) constant domain, or FcRn-binding fragment thereof (e.g., Fc or hinge-Fc domain). In certain embodiments, the antibody is a modified antibody, and preferably the modified IgG constant domain comprises the YTE modification (e.g., MEDI-524 YTE).

[0151] In some embodiments the aforementioned nasal turbinate and/or nasal secretion antibody concentrations are present in the subject at about or for about 12 to 24 hours after the administration of the first dose of the antibody of the invention and prior to the optional administration of a subsequent dose. In some embodiments, the aforementioned nasal turbinate and/or nasal secretion antibody concentrations are present for a certain amount of days after the administration of the first dose of the antibody and prior to the optional administration of a subsequent dose, wherein said certain number of days is from about 20 days to about 180 days (or more), and in certain embodiments is at least 20 days, at least 25 days, at least 30 days, at least 35 days, at least 40 days, at least 45 days, at least 50 days, at least 60 days, at least 75 days, at least 90 days, at least 105 days, at least 120 days, at least 135 days, at least 150 days, at least 165 days, at least 180 days or more. In certain embodiments, the first dose of the antibody resulting in the aforementioned nasal turbinate and/or nasal secretion antibody concentrations is about 60 mg/kg or less, about 50 mg/kg or less, about 45 mg/kg or less, about 40 mg/kg or less, about 30 mg/kg or less, about 20 mg/kg or less, about 15 mg/kg or less, about 10 mg/kg or less, about 5 mg/kg or less, about 4 mg/kg or less, about 3 mg/kg, about 2 mg/kg or less, about 1.5 mg/kg or less, about 1.0 mg/kg or less, about 0.80 mg/kg or less, about 0.40 mg/kg or less, about 0.20 mg/kg or less, about 0.10 mg/kg or less, about 0.05 mg/kg or less, or about 0.025 mg/kg or less. In some embodiments, the first dose of an antibody of the invention is a prophylactically or therapeutically effective dose that results in any one of the aforementioned nasal turbinate and/or nasal secretion antibody concentrations. In one embodiment, the first dose of an antibody of the invention is administered in a sustained release formulation and/or by intranasal and/or pulmonary delivery. The antibody of the invention may or may not comprise a modified IgG (e.g., IgG1) constant domain, or FcRn-binding fragment thereof (e.g., Fc or hinge-Fc domain). In certain embodiments, the antibody is a modified antibody, and preferably the modified IgG constant domain comprises the YTE modification (e.g, MEDI-524 YTE).

[0152] In specific embodiments, the present invention provides methods for preventing, managing, treating and/or ameliorating a RSV infection (e.g., acute RSV disease, or a RSV URI and/or LRI), otitis media (preferably, stemming from, caused by or associated with a RSV infection, such as a RSV URI and/or LRI), and/or a symptom or respiratory condition relating thereto (e.g., asthma, wheezing, and/or RAD) in a subject, said methods comprising administering an effective amount of an antibody of the invention, wherein the effective amount results in a reduction of about 1-fold, about 1.5-fold, about 2-fold, about 3-fold, about 4-fold, about 5-fold, about 8-fold, about 10-fold, about 15-fold, about 20-fold, about 25-fold, about 30-fold, about 35-fold, about 40-fold, about 45-fold, about 50-fold, about 55-fold, about 60-fold, about 65-fold, about 70-fold, about 75-fold, about 80-fold, about 85-fold, about 90-fold, about 95-fold, about 100-fold, about 105-fold, about 110-fold, about 115-fold, about 120 fold, about 125-fold or higher in RSV titer in the nasal turbinate and/or nasal secretion. The fold-reduction in RSV titer in the nasal turbinate and/or nasal secretion may be as compared to a negative control (such as placebo), as compared to another therapy (including, but not limited to treatment with palivizumab), as compared to the titer in the patient prior to antibody administration or, in the case of modified antibodies, as compared to the same unmodified antibody (e.g., the same antibody prior to constant region modification). The antibody of the invention may or may not comprise a modified IgG (e.g., IgG I) constant domain, or FcRn-binding fragment thereof (e.g., Fc or hinge-Fc domain). In certain embodiments, the antibody is a modified antibody, and preferably the modified IgG constant domain comprises the YTE modification (e.g., MEDI-524 YTE).

[0153] The present invention provides methods of neutralizing RSV in the upper and/or lower respiratory tract or in the middle ear using an antibody of the invention to achieve a prophylactically or therapeutically effective serum titer, wherein said effective serum titer is less than 30 μg/ml (and is preferably about 2 μg/ml, more preferably about 4 μg/ml, and most preferably about 6 μg/ml) for about 20, 25, 30, 35, 40, 45, 60, 75, 90, 105, 120, 135, 150, 165, 180 or more days after administration without any other dosage administration. The antibody of the invention may or may not comprise a modified IgG (e.g., IgG1) constant domain, or FcRn-binding fragment thereof (e.g., Fc or hinge-Fc domain). In certain embodiments, the antibody is a modified antibody, and preferably the IgG constant domain comprises the YTE modification (e.g., MEDI-524 YTE).

[0154] In preferred embodiments, the antibodies used in accordance with the methods of the invention have a high affinity for RSV antigen. In one embodiment, the antibodies used in accordance with the methods of the invention have a higher affinity for a RSV antigen (e.g., RSV F antigen) than known antibodies, (e.g., palivizumab or other wild-type antibodies). The antibody used in accordance with the methods of the invention may or may not comprise a modified IgG (e.g., IgG1) constant domain, or FcRn-binding fragment thereof (e.g., Fc or hinge-Fc domain). In certain embodiments, the antibody is a modified antibody, and preferably the IgG constant domain comprises the YTE modification (e.g., MEDI-524 YTE). In a specific embodiment, the antibodies used in accordance with the methods of the invention have a 20-fold, 25-fold, 30-fold, 35-fold, 40-fold, 45-fold, 50-fold, 55-fold, 60-fold, 65-fold, 70-fold, 75-fold, 80-fold, 90-fold, 100-fold or higher affinity for a RSV antigen than a known anti-RSV antibody as assessed by techniques described herein or known to one of skill in the art (e.g., a BIAcore assay). In a more specific embodiment, the antibodies used in accordance with the methods of the invention have a 20-fold, 25-fold, 30-fold, 35-fold, 40-fold, 45-fold, 50-fold, 55-fold, 60-fold, 65-fold, 70-fold, 75-fold, 80-fold, 90-fold, 100-fold or higher affinity for a RSV F antigen than palivizumab as assessed by techniques described herein or known to one of skill in the art (e.g., a BIAcore assay). In a preferred embodiment, the antibodies used in accordance with the methods of the invention have a 65-fold, preferably 70-fold, or higher affinity for a RSV F antigen than palivizumab as assessed by techniques described herein or known to one of skill in the art (e.g., a BIAcore assay). In accordance with these embodiments, the affinity of the antibodies are, in one embodiment, assessed by a BIAcore assay.

[0155] In one embodiment, the antibodies used in accordance with the methods of the invention immunospecifically bind to one or more RSV antigens and have an association rate constant or kn rate (antibody (Ab)+antigen (Ag)—kₒₙ→Ab-Ag) of between about 10⁵ M⁻¹s⁻¹ to about 10⁸ M⁻¹s⁻¹ (or higher), and in certain embodiments is at least 10⁵ M⁻¹s⁻¹, at least 2×10⁵ M⁻¹s⁻¹, at least 4×10⁵ M⁻¹s⁻¹, at least 5×10⁵ M⁻¹s⁻¹, at least 10⁶ M⁻¹s⁻¹, at least 5×10⁶ M⁻¹s⁻¹, at least 10⁷ M⁻¹s⁻¹, at least 5×10⁷ M⁻¹s⁻¹, or at least 10⁸ M⁻¹s⁻¹. In another embodiment, the antibodies used in accordance with the methods of the invention immunospecifically bind to a RSV antigen and have a kn rate that is 1-fold, 1.5-fold, 2-fold, 3-fold, 4-fold or 5-fold higher than a known anti-RSV antibody. In a preferred embodiment, the antibodies used in accordance with the methods of the invention immunospecifically bind to a RSV F antigen and have a kₒₙ rate that is 1-fold, 2-fold, 3-fold, 4-fold, 5-fold or higher than palivizumab. A more detailed explanation of individual rate constant and affinity calculations can be found in the BIAevaluation Software Handbook (BIAcore, Inc., Piscataway, N.J.) and Kuby (1994) Immunology, 2^{nd} Ed. (W.H. Freeman & Co., New York, N.Y.). The antibody used in accordance with the methods of the invention may or may not comprise a modified IgG (e.g., IgG1) constant domain, or FcRn-binding fragment thereof (e.g., Fc or hinge-Fc domain). In certain embodiments, the antibody is a modified antibody, and preferably the IgG constant domain comprises the YTE modification (e.g., MEDI-524 YTE).

[0156] In a specific embodiment, the antibodies used in accordance with the methods of the invention immunospecifically bind to one or more RSV antigens and have a k_{off} rate (Ab-Ag—K_{off}→Ab+Ag) of less than 5×10⁻¹ s⁻¹, less than 10⁻¹ s⁻¹, less than 5×10⁻² s⁻¹, less than 10⁻² s⁻¹, less than 5×10⁻³ s⁻¹, less than 10⁻³ s⁻¹, and preferably less than 5×10⁻⁴ s⁻¹, less than 10⁻⁴ s⁻¹, less than 5×10⁻⁵ s⁻¹, less than 10⁻⁵ s⁻¹, less than 5×10⁻⁶ s⁻¹, less than 10⁻⁶ s⁻¹, less than 5×10⁻⁷ s⁻¹, less than 10⁻⁷ s⁻¹, less than 5×10⁻⁸ s⁻¹, less than 10⁻⁸ s⁻¹, less than 5×10⁻⁹ s⁻¹, less than 10⁻⁹ s⁻¹, less than 5×10⁻¹⁰ s⁻¹, less than 10⁻¹⁰ s⁻¹. In another embodiment, the antibodies used in accordance with the methods of the invention immunospecifically bind to a RSV antigen and have a k_{off} rate that is 1-fold, 1.5-fold, 2-fold, 3-fold, 4-fold, 5-fold, 10-fold, 20-fold, 30-fold, 40-fold, 50-fold, 60-fold, 70-fold, 80-fold, 90-fold, or 100-fold lower than a known anti-RSV antibody. In a preferred embodiment, the antibodies used in accordance with the methods of the invention immunospecifically bind to a RSV F antigen and have a k_{off} rate that is 1 -fold, 2-fold, 3-fold, 4-fold, 5-fold, 10-fold, 15-fold, 20-fold, 30-fold, 40-fold, 50-fold, 60-fold, 70-fold, 80-fold, 90-fol, or 100-fold or lower than palivizumab. The antibody used in accordance with the methods of the invention may or may not comprise a modified IgG (e.g., IgG1) constant domain, or FcRn-binding fragment thereof (e.g., Fc or hinge-Fc domain). In certain embodiments, the antibody is a modified antibody, and preferably the IgG constant domain comprises the YTE modification (e.g., MEDI-524 YTE).

[0157] In a specific embodiment, the antibodies used in accordance with the methods of the invention immunospecifically bind to one or more RSV antigens have a kₒₙ of between about 10⁵ M⁻¹s⁻¹ and 10⁸ M⁻¹ s⁻¹ (or higher), and in certain embodiments is at least 10⁵ M⁻¹ s⁻¹, preferably at least 2×10⁵ M⁻¹s⁻¹, at least 4×10⁵ M⁻¹s⁻¹, at least 5×10⁵ M⁻¹s⁻¹, at least 10⁶ M⁻¹s⁻¹, at least 5×10⁶ M⁻¹s⁻¹, at least 10⁷ M⁻¹s⁻¹, at least 5×10⁷ M⁻¹ s⁻¹, or at least 10⁸ M⁻¹s⁻¹ and also have a k_{off} rate of less than 5×10⁻¹ s⁻¹, less than 10⁻¹ s⁻¹, less than 5×10⁻² s⁻¹, less than 10⁻² s⁻¹, less than 5×10⁻³ s⁻¹, less than 10⁻³ s⁻¹, and preferably less than 5×10⁻⁴ s⁻¹, less than 10⁻⁴ s⁻¹, less than 7.5×10⁻⁵ s⁻¹, less than 5×10⁻⁵ s⁻¹, less than 10⁻⁵ s⁻¹, less than 5×10⁻⁶ s⁻¹, less than 10⁻⁶ s⁻¹, less than 5×10⁻⁷ s⁻¹, less than 10⁻⁷ s⁻¹, less than 5×10⁻⁸ s⁻¹, less than 10⁻⁸ s⁻¹, less than 5×10⁻⁹ s⁻¹, less than 10⁻⁹ s⁻¹, less than 5×10⁻¹⁰ s⁻¹, or less than 10⁻¹⁰ s⁻¹. In one embodiment, an antibody of the invention has a kₒₙ that is about 2-fold, about 3-fold, about 4-fold, or about 5-fold, or higher than palivizumab. In another embodiment, an antibody of the invention has a k_{off} that is about 2-fold, about 3-fold, about 4-fold, or about 5-fold, or lower than palivizumab. The antibody used in accordance with the methods of the invention may or may not comprise a modified IgG (e.g., IgG1) constant domain, or FcRn-binding fragment thereof (e.g., Fc or hinge-Fc domain). In certain embodiments, the antibody is a modified antibody, and preferably the IgG constant domain comprises the YTE modification (e.g., MEDI-524 YTE).

[0158] In a specific embodiment, the antibodies used in accordance with the methods of the invention immunospecifically bind to one or more RSV antigens and have an affinity constant or Kₐ (kₒₙ/k_{off}) of from about 10² M⁻¹ to about 5×10¹⁵ M⁻¹, and in certain embodiments is at least 10² M⁻¹, at least 5×10² M⁻¹, at least 10³ M⁻¹, at least 5×10³ M⁻¹, at least 10⁴ M⁻¹, at least 5×10⁴ M⁻¹, at least 10⁵ M⁻¹, at least 5×10⁵ M⁻¹, at least 10⁶ M⁻¹, at least 5×10⁶ M⁻¹, at least 10⁷ M⁻¹, at least 5×10⁷ M⁻¹, at least 10⁸ M⁻¹, and preferably at least 5×10⁸ M⁻¹, at least 10⁹ M⁻¹, at least 5×10⁹ M⁻¹, at least 10¹⁰ M⁻¹, at least 5×10 M⁻¹, at least 10¹¹ M⁻¹, at least 5×10¹¹ M⁻¹, at least 10¹² M⁻¹, at least 5×10¹² M⁻¹, at least 10¹³ M⁻¹, at least 5×10¹³ M⁻¹, at least 10¹⁴ M⁻¹, at least 5×10¹⁴ M⁻¹, at least 10¹⁵ M⁻¹, or at least 5×10¹⁵ M⁻¹. The antibody used in accordance with the methods of the invention may or may not comprise a modified IgG (e.g., IgG1) constant domain, or FcRn-binding fragment thereof (e.g., Fc or hinge-Fc domain). In certain embodiments, the antibody is a modified antibody, and preferably the IgG constant domain comprises the YTE modification (e.g., MEDI-524 YTE).

[0159] In one embodiment, an antibody used in accordance with the methods of the invention has a dissociation constant or K_{d} ( of less than 5×10⁻² M, less than 10⁻² M, less than 5×10⁻³ M, less than 10⁻³ M, less than 5×10⁻⁴ M, less than 10⁻⁴ M, less than 5×10⁻⁵ M, less than 10⁻⁵ M, less than 5×10⁻⁶ M, less than 10⁻⁶ M, less than 5×10⁻⁷ M, less than 10⁻⁷ M, less than 5×10⁻⁸ M, less than 10⁻⁸ M, less than 5×10⁻⁹ M, less than 10⁻⁹ M, less than 5×10⁻¹⁰ M, less than 10⁻¹⁰ M, less than 5×10⁻¹¹M, less than 10⁻¹¹M, less than 5×10⁻¹² M, less than 10⁻¹² M, less than 5×10⁻¹³ M, less than 10⁻¹³ M, less than 5×10⁻¹⁴ M, less than 10⁻¹⁴ M, less than 5×10⁻¹⁵ M, less than 10⁻¹⁵ M, or less than 5×10⁻¹⁶ M. The antibody used in accordance with the methods of the invention may or may not comprise a modified IgG (e.g., IgG1) constant domain, or FcRn-binding fragment thereof (e.g., Fc or hinge-Fc domain). In certain embodiments, the antibody is a modified antibody, and preferably the IgG constant domain comprises the YTE modification (e.g., MEDI-524 YTE).

[0160] In a specific embodiment, the antibodies used in accordance with the methods of the invention immunospecifically bind to a RSV antigen and have a dissociation constant (K_{d}) of less than 3000 pM, less than 2500 pM, less than 2000 pM, less than 1500 pM, less than 1000 pM, less than 750 pM, less than 500 pM, less than 250 pM, less than 200 pM, less than 150 pM, less than 100 pM, less than 75 pM as assessed using an described herein or known to one of skill in the art (e.g., a BIAcore assay). In another embodiment, the antibodies used in accordance with the methods of the invention immunospecifically bind to a RSV antigen and have a dissociation constant (K_{d}) of between 25 to 3400 pM, 25 to 3000 pM, 25 to 2500 pM, 25 to 2000 pM, 25 to 1500 pM, 25 to 1000 pM, 25 to 750 pM, 25 to 500 pM, 25 to 250 pM, 25 to 100 pM, 25 to 75 pM, 25 to 50 pM as assessed using an described herein or known to one of skill in the art (e.g., a BIAcore assay). In another embodiment, the antibodies used in accordance with the methods of the invention immunospecifically bind to a RSV antigen and have a dissociation constant (K_{d}) of 500 pM, preferably 100 pM, more preferably 75 pM and most preferably 50 pM as assessed using an described herein or known to one of skill in the art (e.g., a BIAcore assay). The antibody used in accordance with the methods of the invention may or may not comprise a modified IgG (e.g., IgG1) constant domain, or FcRn-binding fragment thereof (e.g., Fc or hinge-Fc domain). In certain embodiments, the antibody is a modified antibody, and preferably the IgG constant domain comprises the YTE modification (e.g., MEDI-524 YTE).

[0161] The present invention also provides methods for preventing, managing, treating and/or ameliorating a RSV infection (e.g., acute RSV disease, or a RSV URI and/or LRI) and/or one or more symptoms associated with an upper and/or lower respiratory tract, middle ear RSV infection and/or RSV disease, said methods comprising administering to a subject a composition (for example, by pulmonary delivery or intranasal delivery) comprising one or more antibodies of the invention which immunospecifically bind to one or more RSV antigens (e.g., RSV F antigen) with higher affinity and/or higher avidity than known antibodies such as, e.g., palivizumab (e.g., antibodies or antibody fragments having an affinity of from about 2×10⁸ M⁻¹ to about 5×10¹² M^{31 1} (or higher), and preferably at least 2×10⁸ M⁻¹, at least 2.5×10⁸ M⁻¹, at least 5×10⁸ M⁻¹, at least 10⁹ M⁻¹, at least 5×10⁹ M⁻¹, at least 10¹⁰ M⁻¹, at least 5×10¹⁰ M^{31 1}, at least 10¹¹ M⁻¹, at least 5×10¹¹ M⁻¹, at least 10¹² M⁻¹, or at least 5×10¹² M⁻¹ for one or more RSV antigens). The antibody used in accordance with the methods of the invention may or may not comprise a modified IgG (e.g., IgG1) constant domain, or FcRn-binding fragment thereof (e.g., Fc or hinge-Fc domain). In certain embodiments, the antibody is a modified antibody, and preferably the IgG constant domain comprises the YTE modification (e.g., MEDI-524 YTE).

[0162] The IC₅₀ is the concentration of antibody that neutralizes 50% of the RSV in an in vitro microneutralization assay. In certain embodiments, the microneutralization assay is a microneutralization assay described herein (for example, as described in Examples 6.4, 6.8, and 6.18 herein) or as in Johnson et al., 1999, J. Infectious Diseases 180:35-40. In specific embodiments, the antibodies used in accordance with the methods of the invention immunospecifically bind to one or more RSV antigens and have a median inhibitory concentration (IC₅₀) of less than 6 nM, less than 5 nM, less than 4 nM, less than 3 nM, less than 2 nM, less than 1.75 nM, less than 1.5 nM, less than 1.25 nM, less than 1 nM, less than 0.75 nM, less than 0.5 nM, less than 0.25 nM, less than 0.1 nM, less than 0.05 nM, less than 0.025 nM, or less than 0.01 nM, in an in vitro microneutralization assay. The antibody used in accordance with the methods of the invention may or may not comprise a modified IgG (e.g., IgG1) constant domain, or FcRn-binding fragment thereof (e.g., Fc or hinge-Fc domain). In certain embodiments, the antibody is a modified antibody, and preferably the IgG constant domain comprises the YTE modification (e.g., MEDI-524 YTE).

[0163] The methods of the invention also encompass the use of antibodies that immunospecifically bind to a RSV antigen (e.g., RSV F antigen), the antibodies comprising a heavy chain variable (VH) chain having the amino acid sequence of any VH chain used in Table 2. The methods of the invention also encompass the use of antibodies that immunospecifically bind to a RSV antigen (e.g., RSV F antigen), the antibodies comprising a VH domain having the amino acid sequence of any VH domain listed in Table 2. The methods of the invention further encompass the use of antibodies that immunospecifically bind to a RSV antigen (e.g., RSV F antigen), the antibodies comprising one or more (e.g., one, two or three) VH complementarity determining regions (CDRs) having the amino acid sequence of one or more VH CDRs listed in Table 2 and/or Tables 3A-3C. In preferred embodiments, the antibody comprises VH framework regions that are identical to those shown in FIG. 13A. In other embodiments, the antibody comprises VH framework regions that are identical to those of the VH framework region shown in FIG. 1B. In certain embodiments, the above-referenced antibodies comprise a modified IgG (e.g., IgG1) constant domain, or FcRn binding fragment thereof (e.g., the Fc domain or hinge-Fc domain), described herein, and preferably the modified IgG constant domain comprises the YTE modification (e.g., MEDI-524-YTE).

[0164] The methods of the invention also encompass the use of antibodies that immunospecifically bind to a RSV antigen (e.g., RSV F antigen), the antibodies comprising a light chain variable (VL) chain having the amino acid sequence of any VL chain used in Table 2. The methods of the invention also encompass the use of antibodies that immunospecifically bind to a RSV antigen (e.g., RSV F antigen), the antibodies comprising a light chain variable (VL) domain having the amino acid sequence of any VL domain listed in Table 2. The methods of the invention also encompass the use of antibodies that immunospecifically bind to a RSV antigen (e.g., RSV F antigen), the antibodies comprising one or more VL CDRs having the amino acid sequence of one or more VL CDRs listed in Table 2 and/or Tables 3D-3F. In preferred embodiments, the antibody comprises VL framework regions are identical to that shown in FIG. 13B. In other embodiments, the antibody comprises VL framework regions that are identical to that shown in FIG. 1A. In certain embodiments, the above-referenced antibodies comprise a modified IgG (e.g., IgG1) constant domain, or FcRn binding fragment thereof (e.g., the Fc domain or hinge-Fc domain), described herein, and preferably the modified IgG constant domain comprises the YTE modification (e.g., MEDI-524-YTE).

[0165] The methods of the invention also encompass the use of antibodies that irmunospecifically bind to a RSV antigen (e.g., RSV F antigen), the antibodies comprising a VH chain having an amino acid sequence of any VH chain listed in Table 2 and a VL chain having an amino acid sequence of any VL chain listed in Table 2. The methods of the invention also encompass the use of antibodies that immunospecifically bind to a RSV antigen (e.g., RSV F antigen), the antibodies comprising a VH domain and a VL domain having the amino acid sequence of any VH domain and any VL domain listed in Table 2. The methods of the invention further encompass the use of antibodies that immunospecifically bind to a RSV antigen (e.g., RSV F antigen), the antibodies comprising any one or more (e.g., one, two, or three) VH CDRs and any one or more (e.g., one, two, or three) VL CDRs having an amino acid sequence of one or more VH CDRs and one or more VL CDRs listed in Table 2 and/or Tables 3A-3F. In certain embodiments, the above-referenced antibodies comprise a modified IgG (e.g., IgGl) constant domain, or FcRn binding fragment thereof (e.g., the Fc domain or hinge-Fc domain), described herein, and preferably the modified IgG constant domain comprises the YTE modification (e.g., MEDI-524-YTE).

[0166] In some embodiments, the methods of the invention encompass the use of an antibody listed in Table 2. In certain embodiments, the antibody listed in Table 2 comprises a modified IgG constant domain, or FcRn-binding fragment thereof (preferably, Fc domain or hinge-Fc domain). In preferred embodiments, the methods of the invention encompass the use of a A4B4L1 FR-S28R (MEDI-524) (FIG. 13) antibody or a modified antibody thereof. In one embodiment, the antibody comprises a VH and/or VL domain(s) or chain(s) of the A4B4L1FR-S28R (MEDI-524) antibody. In certain embodiments, the A4B4L1FR-S28R (MEDI-524) antibody comprises a modified IgG constant domain, or FcRn-binding fragment thereof (preferably, Fc domain or hinge-Fc domain). In preferred embodiments, the A4B4L1FR-S28R (MEDI-524) antibody comprises a modified IgG, such as a modified IgG1, constant domain, or FcRn-binding fragment thereof, comprising YTE.

[0167] Thus, methods of the invention encompass the use of modified antibodies which have increased in vivo half-lives compared to known anti-RSV antibodies as a result of, e.g., one or more modifications in amino acid residues identified to be involved in the interaction between the Fc domain of said modified antibodies and the FcRn receptor. In one embodiment, the methods of the invention encompass the use of an antibody that immunospecifically binds to a RSV antigen (e.g., RSV F antigen) with a high affinity and/or high avidity (e.g., an antibody that has a higher affinity and/or avidity for a RSV F antigen than palivizumab, including but not limited to those described in Table 2), and which comprises a modified IgG constant domain, or FcRn-binding fragment thereof (preferably, Fc domain or hinge-Fc domain), wherein the modified IgG constant domain results in increased affinity of the modified IgG constant domain for the FcRn relative to the same antibody that does not comprise a modified IgG domain or another RSV-antibody, such as the Fc domain of palivizumab. In accordance with this embodiment, the increased affinity of the Fc domain of said modified antibodies results in an in vivo half-life of said modified antibodies of from about 20 days to about 180 days (or more) and in some embodiments is at least 20 days, at least 25 days, at least 30 days, at least 35 days, at least 40 days, at least 45 days, at least 50 days, at least 60 days, at least 75 days, at least 90 days, at least 105 days, at least 120 days, at least 135 days, at least 150 days, at least 165 days, at least 180 days or longer. In a preferred embodiment, the modified antibody comprises the VH and VL domain or chain of A4B4L1FR-S28R (MEDI-524) (FIG. 13), or an antigen-binding fragment thereof, and an Fc domain with increased affinity for the FcRn receptor relative to the Fc domain of, e.g., palivizumab. In certain embodiments, the modified antibody comprises the YTE modification.

[0168] The methods of the invention encompass the use of one or more antibodies (modified or unmodified) which immunospecifically bind to one or more RSV antigens (preferably, RSV F antigen) wherein said antibody is pegylated. In one embodiment, the methods of the invention encompass the use of one or more pegylated antibodies that immunospecifically bind to one or more RSV antigens (preferably, a RSV F antigen) with a high avidity and/or high affinity (e.g., a higher affinity for a RSV F antigen than palivizumab), including but not limited to those described in Table 2. In a preferred embodiment, the antibody is a pegylated A4B4L1FR-S28R (MEDI-524) antibody or an antigen-binding fragment thereof.

[0169] In one embodiment, the methods of the invention encompass the use of one or more pegylated antibodies which immunospecifically bind to a RSV antigen with a higher affinity and/or avidity (e.g., higher than palivizumab). In a specific embodiment, the pegylated antibody comprises a VH and/or VL domain or chain of an antibody described in Table 2. In a preferred embodiment, the pegylated antibody comprises a VH and/or VL domain or chain of A4B4L 1 FR-S28R (MEDI-524) (FIG. 13) or an antigen binding fragment thereof. In one embodiment, the antibody comprises a VH and/or VL domain or chain of an antibody listed in Table 2. In a preferred embodiment, the pegylated antibody comprises the VH and VL chain of A4B4L1 FR-S28R (MEDI-524). In certain embodiments, the pegylated antibody is a modified pegylated antibody.

### 5.1 Antibodies

[0170] It should be recognized that antibodies that immunospecifically bind to a RSV antigen are known in the art. For example, palivizumab is a humanized monoclonal antibody presently used for the prevention of RSV infection in pediatric patients. The present invention provides methods for preventing, managing, treating and/or ameliorating a RSV infection (e.g., acute RSV disease, or a RSV URI and/or LRI), otitis media (preferably, stemming from, caused by or associated with a RSV infection, such as a RSV URI and/or LRI), and/or a symptom or respiratory condition relating thereto (e.g., asthma, wheezing, and/or RAD) by administering to a subject an effective amount of an anti-RSV antibody of the invention (preferably, A4B4L1FR-S28R (MEDI-524) or an antigen-binding fragment thereof).

[0171] The present invention also provides methods for preventing, managing, treating and/or ameliorating a RSV infection (e.g., acute RSV disease, or a RSV URI and/or LRI), otitis media (preferably, stemming from, caused by or associated with a RSV infection, such as a RSV URI and/or LRI), and/or a symptom or respiratory condition relating thereto (e.g., asthma, wheezing, and/or RAD) by administering to a subject an effective amount of an anti-RSV antibody of the invention, wherein the antibody comprises a modified IgG constant domain, or FcRn-binding fragment thereof (preferably, Fc domain or hinge-Fc domain). In preferred embodiments, the modified antibody is a modified A4B4L1FR-S28R (MEDI-524) antibody (e.g., MEDI-524-YTE). The amino acid modifications may be any modification of a residue (and, in some embodiments, the residue at a particular position is not modified but already has the desired residue), preferably at one or more of residues 251-256, 285-290, 308-314, 385-389, and 428-436, that increases the in vivo half-life of the IgG constant domain, or FcRn-binding fragment thereof (e.g., Fc or hinge-Fc domain), and any molecule attached thereto, and increases the affinity of the modified IgG, or fragment thereof, for FcRn. In preferred embodiment, the modified antibodies have one or more amino acid modifications in the second constant CH2 domain (residues 231-340 of human IgG1) (e.g., SEQ ID NO:339) (see, e.g., FIG. 20B) and/or the third constant CH3 domain (residues 341-447 of human IgG1) (e.g., SEQ ID NO:340) (see, e.g., FIG. 20B), with numbering according to the EU Index as in Kabat, supra. In certain embodiments, the antibody comprises a tyrosine at position 252 (252Y), a threonine at position 254 (254T), and/or a glutamic acid at position 256 (256E) (e.g., a M252Y, S254T and/or T256E mutation (see EU index in Kabat et al. (1991). Sequences of proteins of immunological interest. (U.S. Department of Health and Human Services, Washington, D.C.) 5^{th} ed.) in the constant domain, or FcRn-binding fragment thereof.

[0172] Set forth below, is a more detailed description of the antibodies encompassed within the various aspects of the invention.

[0173] The present invention provides antibodies (modified and unmodified) that immunospecifically bind to one or more RSV antigens. Preferably, the antibodies of the invention immunospecifically bind to one or more RSV antigens regardless of the strain of RSV. The present invention also provides antibodies that differentially or preferentially bind to RSV antigens from one strain of RSV versus another RSV strain. In a specific embodiment, the antibodies of the invention immunospecifically bind to the RSV F glycoprotein, G glycoprotein or SH protein. In a preferred embodiment, the antibodies present invention immunospecifically bind to the RSV F glycoprotein. In another preferred embodiment, the antibodies of the present invention bind to the A, B, or C antigenic sites of the RSV F glycoprotein.

[0174] Antibodies of the invention include, but are not limited to, monoclonal antibodies, multispecific antibodies, human antibodies, humanized antibodies, chimeric antibodies, single domain antibodies, camelised antibodies, single chain Fvs (scFv) single chain antibodies, Fab fragments, F(ab′) fragments, disulfide-linked Fvs (sdFv) intrabodies, and anti-idiotypic (anti-Id) antibodies (including, e.g., anti-Id antibodies to antibodies of the invention), and epitope-binding fragments of any of the above. In particular, antibodies of the present invention include immunoglobulin molecules and immunologically active portions of immunoglobulin molecules, i.e., molecules that contain an antigen binding site that immunospecifically binds to a RSV antigen. The immunoglobulin molecules of the invention can be of any type (e.g., IgG, IgE, IgM, IgD, IgA and IgY), class (e.g., IgG1, IgG2, IgG3, IgG4, IgA1 and IgA2) or subclass of immunoglobulin molecule. In a specific embodiment, an antibody (modified or unmodified) of the invention is an IgG antibody, preferably an IgG1. In another specific embodiment, an antibody of the invention is not an IgA antibody.

[0175] The antibodies of the invention may be from any animal origin including birds and mammals (e.g., human, murine, donkey, sheep, rabbit, goat, guinea pig, camel, horse, or chicken). Preferably, the antibodies of the invention are human or humanized monoclonal antibodies. As used herein, “human” antibodies include antibodies having the amino acid sequence of a human immunoglobulin and include antibodies isolated from human immunoglobulin libraries or from mice that express antibodies from human genes.

[0176] The antibodies of the present invention may be monospecific, bispecific, trispecific or of greater multispecificity. Multispecific antibodies may be specific for different epitopes of a RSV polypeptide or may be specific for both a RSV polypeptide as well as for a heterologous epitope, such as a heterologous polypeptide or solid support material. See, e.g., PCT publications WO 93/17715, WO 92/08802, WO 91/00360, and WO 92/05793; Tutt, et al., J. Immunol. 147:60-69(1991); U.S. Pat. Nos. 4,474,893, 4,714,681, 4,925,648, 5,573,920, and 5,601,819; and Kostelny et al., J. Immunol. 148:1547-1553 (1992).

[0177] In a specific embodiment, antibodies for use in the methods of the invention are bispecific T cell engagers (BiTEs). Bispecific T cell engagers (BiTE) are bispecific antibodies that can redirect T cells for antigen-specific elimination of targets. A BiTE molecule has an antigen-binding domain that binds to a T cell antigen (e.g., CD3) at one end of the molecule and an antigen binding domain that will bind to an antigen on the target cell. A BiTE molecule was recently described in International Publication No. WO 99/54440, which is herein incorporated by reference. This publication describes a novel single-chain multifunctional polypeptide that comprises binding sites for the CD 19 and CD3 antigens (CD19xCD3). This molecule was derived from two antibodies, one that binds to CD 19 on the B cell and an antibody that binds to CD3 on the T cells. The variable regions of these different antibodies are linked by a polypeptide sequence, thus creating a single molecule. Also described, is the linking of the heavy chain (VH) and light chain (VL) variable domains with a flexible linker to create a single chain, bispecific antibody.

[0178] In an embodiment of this invention, an antibody or ligand that immunospecifically binds a RSV polypeptide will comprise a portion of the BiTE molecule. For example, the V_{H} and/or V_{L} of an antibody that binds a RSV polypeptide can be fused to an anti-CD3 binding portion such as that of the molecule described above, thus creating a BiTE molecule that targets the RSV polypeptide. In addition to the V_{H} and/or V_{L} domains of antibody against a RSV polypeptide, other molecules that bind the RSV polypeptide can comprise the BiTE molecule. In another embodiment, the BiTE molecule can comprise a molecule that binds to other T cell antigens (other than CD3). For example, ligands and/or antibodies that immunospecifically bind to T-cell antigens like CD2, CD4, CD8, CD11a, TCR, and CD28 are contemplated to be part of this invention. This list is not meant to be exhaustive but only to illustrate that other molecules that can immunospecifically bind to a T cell antigen can be used as part of a BiTE molecule. These molecules can include the VH and/or VL portions of the antibody or natural ligands (for example LFA3 whose natural ligand is CD3).

[0179] In certain embodiments, the antibody to be used with the invention binds to an intracellular epitope, i.e., is an intrabody. An intrabody comprises at least a portion of an antibody that is capable of immunospecifically binding an antigen and preferably does not contain sequences coding for its secretion. Such antibodies will bind antigen intracellularly. In one embodiment, the intrabody comprises a single-chain Fv (“scFv”). scFvs are antibody fragments comprising the V_{H} and VL domains of an antibody, wherein these domains are present in a single polypeptide chain. Generally, the scFv polypeptide further comprises a polypeptide linker between the VH and VL domains which enables the scFv to form the desired structure for antigen binding. For a review of scFvs see Pluckthun in The Pharmacology of Monoclonal Antibodies, vol. 113, Rosenburg and Moore eds. Springer-Verlag, New York, pp. 269-315 (1994). In a further embodiment, the intrabody preferably does not encode an operable secretory sequence and thus remains within the cell (see generally Marasco, Wash., 1998, Intrabodies: Basic Research and Clinical Gene Therapy Applications, Springer:New York).

[0180] The present invention provides for antibodies that exhibit a high potency in an assay described herein. High potency antibodies can be produced by methods disclosed in copending U.S. patent application Ser. Nos. 60/168,426, 60/186,252, U.S. Publication No. 2002/0098189, and U.S. Pat. No. 6,656,467 (which are incorporated herein by reference in their entirety) and methods described herein. For example, high potency antibodies can be produced by genetically engineering appropriate antibody gene sequences and expressing the antibody sequences in a suitable host. The antibodies produced can be screened to identify antibodies with, e.g., high kₒₙ values in a BIAcore assay.

[0181] In a specific embodiment, an antibody of the invention has approximately 20-fold, 25-fold, 30-fold, 35-fold, 40-fold, 45-fold, 50-fold, 55-fold, 60-fold, 65-fold, 70-fold, 75-fold, 80-fold, 90-fold, 100-fold or higher affinity for a RSV antigen (e.g., RSV F antigen) than palivizumab or an antibody-binding fragment thereof as assessed by an assay known in the art or described herein (e.g., a BIAcore assay). In another embodiment, an antibody of the invention has an approximately 1-fold, 1.5-fold, 2-fold, 3-fold, 4-fold, 5-fold, or more higher Kₐ than palivizumab or an antigen-binding fragment thereof as assessed by an assay known in the art or described herein. In another embodiment, an antibody of the invention has an approximately 1-fold, 2-fold, 3-fold, 4-fold, 5-fold, 6-fold, 7-fold, 8-fold, 9-fold, 10-fold, 11 -fold 12-fold, 13-fold, 14-fold, 15-fold, 16-fold, 17-fold, 18-fold, 19-fold, or 20-fold or more potent than palivizumab or an antigen-binding fragment thereof in an in vitro microneutralization assay. In certain embodiments, the microneutralization assay is a microneutralization assay described herein (for example, as described in Examples 6.4, 6.8, and 6.18 herein) or as in Johnson et al., 1999, J. Infectious Diseases 180:35-40. The amino acid sequence of palivizumab is disclosed, e.g., in Johnson et al., 1997, J. Infectious Disease 176:1215-1224, and U.S. Pat. No. 5,824,307, each of which is incorporated herein by reference in its entirety. In some embodiments, an antibody of the invention is an antibody comprising a VH domain of SEQ ID NO:7 (or VH chain of SEQ ID NO:208) and/or a VL domain of SEQ ID NO:8 (or VL chain of SEQ ID NO:209). In some embodiments, an antibody of the invention is an antibody comprising a VH domain of SEQ ID NO:7 (or VH chain of SEQ ID NO:208) and/or a VL domain of SEQ ID NO:8 (or VL chain of SEQ ID NO:209). In certain embodiments, the above-referenced antibodies comprise a modified IgG (e.g., IgG1) constant domain, or FcRn binding fragment thereof (e.g., the Fc domain or hinge-Fc domain), described herein, and preferably the modified IgG constant domain comprises the YTE modification (e.g., MEDI-524-YTE). In other embodiments, a modified antibody of the invention is a modified palivizumab antibody or a modified antibody comprising a VH domain of SEQ ID NO:7 (or VH chain of SEQ ID NO:208) and/or a VL domain of SEQ ID NO:8 (or VL chain of SEQ ID NO:209).

[0182] The present invention provides for antibodies that immunospecifically bind to one or more RSV antigens, said antibodies comprising the amino acid sequence of palivizumab with one or more amino acid residue substitutions in the variable light (VL) domain and/or variable heavy (VH) domain or chain depicted in FIG. 1. The present invention also provides for antibodies that immunospecifically bind to one or more RSV antigens, said antibodies comprising the amino acid sequence of palivizumab with one or more amino acid residue substitutions in one or more VL CDRs and/or one or more VH CDRs. In a specific embodiment, an antibody comprises the amino acid sequence of palivizumab with one or more amino acid residue substitutions of the amino acid residues indicated in bold face and underlining in Table 1. In another embodiment, an antibody comprises the amino sequence of palivizumab with one or more amino acid residue substitutions of the amino acid residues indicated in bold face and underlining in Table 1 and one or more amino acid residue substitutions of the framework regions of the variable domains of palivizumab (e.g., mutations in framework region 4 of the heavy and/or light variable domains). In accordance with these embodiments, the amino acid residue substitutions can be conservative or non-conservative. In certain embodiments, the above-referenced antibodies comprise a modified IgG (e.g., IgG1) constant domain, or FcRn binding fragment thereof (e.g., the Fc domain or hinge-Fc domain), described herein, and preferably the modified IgG constant domain comprises the YTE modification (e.g., MEDI-524-YTE). The antibody generated by introducing substitutions in the VH domain, VH CDRs, VL domain and/or VL CDRs of palivizumab can be tested in vitro and in vivo, for example, for its ability to bind to RSV F antigen, for its ability to neutralize RSV, or for its ability to prevent, manage, treat and/or ameliorate a RSV infection (e.g., acute RSV disease, or a RSV URI and/or LRI), otitis media (preferably, stemming from, caused by or associated with a RSV infection, such as a RSV URI and/or LRI), and/or a symptom or respiratory condition relating thereto (e.g., asthma, wheezing, and/or RAD). In certain embodiments, the antibody does not comprise the VH chain and/or VL chain of palivizumab. In some embodiments, the antibody does not comprise the VH domain and/or the VL domain of palivizumab. In other embodiments, the antibody does not comprise a VH CDR1, VH CDR2, and/or VH CDR3 of palivizumab. In yet other embodiments, the antibody does not comprise a VL CDR1, VL CDR2, and/or VL CDR3 of palivizumab. In specific embodiments, the antibody is not palivizumab.

TABLE 1
CDR Sequences of palivizumab

| CDR | Sequence* | SEQ ID NO: |
|---|---|---|
| VH1 | TSGMSVG | 1 |
| VH2 | DIWWDDKKDYNPSLKS | 2 |
| VH3 | SMITNWYFDV | 3 |
| VL1 | KCQLSVGYMH | 4 |
| VL2 | DTSKLAS | 5 |
| VL3 | FQGSGYPFT | 6 |

*Bold faced & underlined amino acid residues are preferred residues which should be substituted.

[0183] The antibodies of the present invention include those antibodies and antigen-binding fragments of the antibodies referenced in Table 2, the Examples Section, and elsewhere in the application. In all cases, the antibody may be a modified antibody (i.e., comprises a modified IgG constant domain or FcRn binding fragment thereof (e.g., the Fc domain or hinge-Fc domain)) or may be an unmodified antibody (i.e., does not comprise a modified IgG constant domain or FcRn binding fragment thereof). In a specific embodiment, an antibody of the present invention is AFFF, P12f2, Pl2f4, P1 1d4, Ale9, A12a6, A13c4, A17d4, A4B4, A8c7, 1X-493L1FR, H3-3F4, M3H9, Y10H6, DG, AFFF(1), 6H8, L1-7E5, L2-15B10, A13a11, A1h5, A4B4(1), A4B4L1FR-S28R (MEDI-524), A4B4-F52S, A17d4(1), A3e2, A14a4, A16b4, A17b5, A17f5, or A17h4 antibody. In another embodiment, an antibody of the invention comprises an antigen-binding fragment (e.g., a Fab fragment of) AFFF, P12f2, P12f4, P11d4, Ale9, A12a6, A13c4, A17d4, A4B4, A8c7, 1X-493L1FR, H3-3F4, M3H9, Y10H6, DG, AFFF(1), 6H8, L1-7E5, L2-15B10, A13a11, A1h5, A4B4(1), A4B4L1FR-S28R (MEDI-524), A4B4-F52S, A17d4(1), A3e2, A14a4, A16b4, A17b5, A17f5, or A17h4. In a preferred embodiment, an antibody of the invention is A4B4L1FR-S28R (MEDI-524) antibody or an antigen-binding fragment thereof. In certain embodiments, the above-referenced antibodies comprise a modified IgG (e.g., IgG1) constant domain, or FcRn binding fragment thereof (e.g., the Fc domain or hinge-Fc domain), described herein, and preferably the modified IgG constant domain comprises the YTE modification (e.g., MEDI-524-YTE).

[0184] In some embodiments, a AFFF, P12f2, P12f4, P11d4, Ale9, A12a6, A13c4, A17d4, A4B4, A8c7, 1X-493L1FR, H3-3F4, M3H9, Y10H6, DG, AFFF(1), 6H8, L1-7E5, L2-15B10, A13a11, A1h5, A4B4(1), A4B4L1FR-S28R (MEDI-524), A4B4-F52S, A17d4(1), A3e2, A14a4, A16b4, A17b5, A17f5, and/or A17h4 antibody comprises the framework region of palivizumab (see FIG. 1). In preferred embodiments, a AFFF, P12f2, P12f4, P11d4, A1e9, A12a6, A13c4, A17d4, A4B4, A8c7, 1X-493L1FR, H3-3F4, M3H9, Y10H6, DG, AFFF(1), 6H8, L1-7E5, L2-15B10, A13a11, A1h5, A4B4(1), A4B4L1FR-S28R (MEDI-524), A4B4-F52S, A17d4(1), A3e2, A14a4, A16b4, A17b5, A17f5, and/or A17h4 antibody comprises the framework region of palivizumab with the exception that there is an amino acid substitution of an A105Q in the heavy chain framework 4 (FR4) (Kabat et al. (1991) Sequences of proteins of immunological interest. (U.S. Department of Health and Human Services, Washington, D.C.) 5^{th} ed.) (i.e., position 112 in SEQ ID NO:7 (palivizumab VH domain)) and an L104V in the light chain FR4 (i.e., position 103 in SEQ ID NO:8 (palivizumab VL domain)). An example of an antibody that comprises a framework with these VH and VL single mutations is shown in FIG. 2 (1X-493L1FR) and in FIG. 13 (MEDI-524). In certain embodiments, the above-referenced antibodies comprise a modified IgG (e.g., IgG1) constant domain, or FcRn binding fragment thereof (e.g., the Fc domain or hinge-Fc domain), described herein, and preferably the modified IgG constant domain comprises the YTE modification (e.g., MEDI-524-YTE).

[0185] In a specific embodiment, the present invention provides for one or more antibodies that immunospecifically bind to one or more RSV F antigens, said antibodies comprising a VH chain and/or VL chain having the amino acid sequence of a VH chain and/or VL chain of AFFF, P12f2, P12f4, P11d4, A1e9, A12a6, A13c4, A17d4, A4B4, A8c7, 1X-493L1FR, H3-3F4, M3H9, Y10H6, DG, AFFF(1), 6H8, L1-7E5, L2-15B10, A13a11, A1h5, A4B4(1), A4B4L1FR-S28R (MEDI-524), A4B4-F52S, A17d4(1), A3e2, A14a4, A16b4, A17b5, A17f5, and/or A17h4. In a preferred embodiment, an antibody of the invention immunospecifically binds to a RSV F antigen, and said antibody comprises a VH chain and/or a VL chain having the amino acid sequence of the VH and/or VL chain of A4B4L1FR-S28R (MEDI-524). In another embodiment, the present invention provides for one or more antibodies that immunospecifically bind to one or more RSV antigens, said antibodies comprising a VH domain and/or VL domain having the amino acid sequence of a VH domain and/or VL domain of AFFF, P12f2, P12f4, P11d4, A1e9, A12a6, A13c4, A17d4, A4B4, A8c7, 1X-493L1FR, H3-3F4, M3H9, Y10H6, DG, AFFF(1), 6H8, L1-7E5, L2-15B10, A13a11, A1h5, A4B4(1), A4B4L1FR-S28R (MEDI-524), A4B4-F52S, A17d4(1), A3e2, A14a4, A16b4, A17b5, A17f5, and/or A17h4. In a preferred embodiment, an antibody of the invention immunospecifically binds to a RSV F antigen, and said antibody comprises a VH domain and/or VL domain having the amino acid sequence of the VH domain and/or VL domain of A4B4L1FR-S28R (MEDI-524). In certain embodiments, the above-referenced antibodies comprise a modified IgG (e.g., IgG1) constant domain, or FcRn binding fragment thereof (e.g., the Fc domain or hinge-Fc domain), described herein, and preferably the modified IgG constant domain comprises the YTE modification (e.g., MEDI-524-YTE).

[0186] In another embodiment, the present invention provides for antibodies that immunospecifically bind to one or more RSV antigens, said antibodies comprising one, two, three, or more CDRs having the amino acid sequence of one, two, three, or more CDRs of AFFF, P12f2, P12f4, P11d4, A1e9, A12a6, A13c4, A17d4, A4B4, A8c7, 1X-493L1FR, H3-3F4, M3H9, Y10H6, DG, AFFF(1), 6H8, L1-7E5, L2-15B10, A13a11, A1h5, A4B4(1), A4B4L1FR-S28R (MEDI-524), A4B4-F52S, A17d4(1), A3e2, A14a4, A16b4, A17b5, A17f5, and/or A17h4. In a preferred embodiment, an antibody of the invention immunospecifically binds to a RSV antigen, and said antibody comprises one, two, three, or more CDRs having the amino acid sequence of one, two, three, or more CDRs of A4B4L1FR-S28R (MEDI-524). In yet another embodiment, the present invention provides for one or more antibodies that immunospecifically bind to one or more RSV F antigens, said antibodies comprising a combination of VH CDRs and/or VL CDRs having the amino acid sequence of VH CDRs and/or VL CDRs of AFFF, P12f2, P12f4, P11d4, A1e9, A12a6, A13c4, A17d4, A4B4, A8c7, 1X-493L1FR, H3-3F4, M3H9, Y10H6, DG, AFFF(1), 6H8, L1-7E5, L2-15B10, A13a11, A1h5, A4B4(1), A4B4L1FR-S28R (MEDI-524), A4B4-F52S, A17d4(1), A3e2, A14a4, A16b4, A17b5, A17f5, and/or A17h4. In a preferred embodiment, an antibody of the invention immunospecifically binds to a RSV F antigen and said antibody comprises a combination of VH CDRs and/or VL CDRs having the amino acid sequence of the VH CDRs and/or VL CDRs of A4B4L1FR-S28R (MEDI-524). In certain embodiments, the above-referenced antibodies comprise a modified IgG (e.g., IgG1) constant domain, or FcRn binding fragment thereof (e.g., the Fc domain or hinge-Fc domain), described herein, and preferably the modified IgG constant domain comprises the YTE modification (e.g., MEDI-524-YTE).

[0187] The present invention provides antibodies that immunospecifically bind to one or more RSV antigens (e.g., RSV F antigen), said antibodies comprising a VH chain having an amino acid sequence of any one of the VH chains listed in Table 2. In certain embodiments, the above-referenced antibodies comprise a modified IgG (e.g., IgG1) constant domain, or FcRn binding fragment thereof (e.g., the Fc domain or hinge-Fc domain), described herein, and preferably the modified IgG constant domain comprises the YTE modification (e.g., MEDI-524-YTE).

[0188] The invention also provides antibodies that immunospecifically bind to one or more RSV antigens (e.g., RSV F antigen), said antibodies comprising a VH domain having an amino acid sequence of any one of the VH domains listed in Table 2. In certain embodiments, the above-referenced antibodies comprise a modified IgG (e.g., IgG1) constant domain, or FcRn binding fragment thereof (e.g., the Fc domain or hinge-Fc domain), described herein, and preferably the modified IgG constant domain comprises the YTE modification (e.g., MEDI-524-YTE).

[0189] The present invention also provides antibodies that immunospecifically bind to one or more RSV antigens, said antibodies comprising one or more VH CDRs (e.g., VH CDR1, VH CDR2, and/or VH CDR3) having an amino acid sequence of any one of the VH CDRs listed in Table 2 and/or Tables 3A-3C. In certain embodiments of the invention, an antibody comprising a VH CDR having an amino acid sequence of any of one of the VH CDRs listed in Table 2 and/or Tables 3A-3C is not palivizumab. In some embodiments, the antibody comprises one, two or three of the VH CDRs listed in Table 2 and/or Tables 3A-3C. In certain embodiments, the above-referenced antibodies comprise a modified IgG (e.g., IgG1) constant domain, or FcRn binding fragment thereof (e.g., the Fc domain or hinge-Fc domain), described herein, and preferably the modified IgG constant domain comprises the YTE modification (e.g., MEDI-524-YTE). In some embodiments, a modified antibody comprising a VH CDR having an amino acid sequence of any one of the VH CDRs listed in Table 2 and/or Tables 3A-3C is a modified palivizumab.

TABLE 2
Antibodies & Fragments Thereof

| Antibody Name | VH Chain | VH Domain | VH CDR1 | VH CDR2 | VH CDR3 | VL Chain | VL Domain | VL CDR1 | VL CDR2 | VL CDR3 |
|---|---|---|---|---|---|---|---|---|---|---|
| **palivizumab | SEQ ID | SEQ ID | TSGMSVG | DIWWDDKKDYNPSLKS | SMITNWYFDV | SEQ ID | SEQ ID | KCQLSVGYMH | DTSKLAS | FQGSGYPFT |
| | NO: 208 | NO: 7 | (SEQ ID NO: 1) | (SEQ ID NO: 2) | (SEQ ID NO: 3) | NO: 209 | NO: 8 | (SEQ ID NO: 4) | (SEQ ID NO: 5) | (SEQ ID NO: 6) |
| ***AFFF | SEQ ID | SEQ ID | TAGMSVG | DIWWDDKKDYNPSLKS | SMITNFYFDV | SEQ ID | SEQ ID | SASSSVGYMH | DTFKLAS | FQFSGYPFT |
| | NO: 210 | NO: 9 | (SEQ ID NO: 10) | (SEQ ID NO: 2) | (SEQ ID NO: 12) | NO: 211 | NO: 13 | (SEQ ID NO: 14) | (SEQ ID NO: 15) | (SEQ ID NO: 16) |
| ***P12f2 | SEQ ID | SEQ ID | TPGMSVG | DIWWDDKKHYNPSLKD | DMIFNFYFDV | SEQ ID | SEQ ID | SLSSRVGYMH | DTFYLSS | FQGSGYPFT |
| | NO: 212 | NO: 17 | (SEQ ID NO: 18) | (SEQ ID NO: 19) | (SEQ ID NO: 20) | NO: 213 | NO: 21 | (SEQ ID NO: 22) | (SEQ ID NO: 23) | (SEQ ID NO: 6) |
| ***P12f4 | SEQ ID | SEQ ID | TPGMSVG | DIWWDGKKHYNPSLKD | DMIFNFYFDV | SEQ ID | SEQ ID | SLSSRVGYMH | DTRGLPS | FQGSGYPFT |
| | NO: 214 | NO: 24 | (SEQ ID NO: 18) | (SEQ ID NO: 25) | (SEQ ID NO: 20) | NO: 215 | NO: 26 | (SEQ ID NO: 22) | (SEQ ID | (SEQ ID NO: 6) |
| | | | | | | | | | NO: 27) | |
| ***P11d4 | SEQ ID | SEQ ID | TPGMSVG | DIWWDGKKHYNPSLKD | DMIFNWYFDV | SEQ ID | SEQ ID | SPSSRVGYMH | DTMRLAS | FQGSGYPFT |
| | NO: 216 | NO: 28 | (SEQ ID NO: 18) | (SEQ ID NO: 25) | (SEQ ID NO: 29) | NO: 217 | NO: 30 | (SEQ ID NO: 31) | (SEQ ID | (SEQ ID NO: 6) |
| | | | | | | | | | NO: 32) | |
| ***Ale9 | SEQ ID | SEQ ID | TAGMSVG | DIWWDGKKHYNPSLKD | DMIFNWYFDV | SEQ ID | SEQ ID | SLSSRVGYMH | DTFKLSS | FQGSGYPFT |
| | NO: 218 | NO: 33 | (SEQ ID NO: 10) | (SEQ ID NO: 25) | (SEQ ID NO: 29) | NO: 219 | NO: 34 | (SEQ ID NO: 22) | (SEQ ID | (SEQ ID NO: 6) |
| | | | | | | | | | NO: 35) | |
| ***A12a6 | SEQ ID | SEQ ID | TAGMSVG | DIWWDGKKDYNPSLKD | DMIFNFYFDV | SEQ ID | SEQ ID | SASSRVGYMH | DTFKLSS | FQGSGYPFT |
| | NO: 220 | NO: 36 | (SEQ ID NO: 10) | (SEQ ID NO: 37) | (SEQ ID NO: 20) | NO: 221 | NO: 38 | (SEQ ID NO: 39) | (SEQ ID | (SEQ ID NO: 6) |
| | | | | | | | | | NO: 35) | |
| ***A13c4 | SEQ ID | SEQ ID | TAGMSVG | DIWWDGKKSYNPSLKD | DMIFNFYFDV | SEQ ID | SEQ ID | SLSSRVGYMH | DTMYQSS | FQGSGYPFT |
| | NO: 222 | NO: 40 | (SEQ ID NO: 10) | (SEQ ID NO: 41) | (SEQ ID NO: 20) | NO: 223 | NO: 42 | (SEQ ID NO: 22) | (SEQ ID | (SEQ ID NO: 6) |
| | | | | | | | | | NO: 43) | |
| ***A17d4 | SEQ ID | SEQ ID | TAGMSVG | DIWWDDKKSYNPSLKD | DMIFNFYFDV | SEQ ID | SEQ ID | LPSSRVGYMH | DTMYQSS | FQGSGYPFT |
| | NO: 224 | NO: 44 | (SEQ ID NO: 10) | (SEQ ID NO: 45) | (SEQ ID NO: 20) | NO: 225 | NO: 46 | (SEQ ID NO: 47) | (SEQ ID | (SEQ ID NO: 6) |
| | | | | | | | | | NO: 43) | |
| ***A4B4 | SEQ ID | SEQ ID | TAGMSVG | DIWWDDKKHYNPSLKD | DMIFNFYFDV | SEQ ID | SEQ ID | SASSRVGYMH | DTFFLDS | FQGSGYPFT |
| | NO: 226 | NO: 48 | (SEQ ID NO: 10) | (SEQ ID NO: 19) | (SEQ ID NO: 20) | NO: 227 | NO: 49 | (SEQ ID NO: 39) | (SEQ ID | (SEQ ID NO: 6) |
| | | | | | | | | | NO: 50) | |
| ****A8c7 | SEQ ID | SEQ ID | TAGMSVG | DIWWDDKKSYNPSLKD | DMIFNWYFDV | SEQ ID | SEQ ID | SPSSRVGYMH | DTRYQSS | FQGSGYPFT |
| | NO: 228 | NO: 51 | (SEQ ID NO: 10) | (SEQ ID NO: 45) | (SEQ ID NO: 29) | NO: 229 | NO: 52 | (SEQ ID NO: 31) | (SEQ ID | (SEQ ID NO: 6) |
| | | | | | | | | | NO: 53) | |
| *1X- | SEQ ID | SEQ ID | TSGMSVG | DIWWDDKKDYNPSLKS | SMITNWYFDV | SEQ ID | SEQ ID | SASSSVGYMH | DTSKLAS | FQGSGYPFT |
| 493L1FR | NO: 230 | NO: 343 | (SEQ ID NO: 1) | (SEQ ID NO: 2) | (SEQ ID NO: 3) | NO: 231 | NO: 54 | (SEQ ID NO: 14) | (SEQ ID NO: 5) | (SEQ ID NO: 6) |
| *H3-3F4 | SEQ ID | SEQ ID | TAGMSVG | DIWWDDKKDYNPSLKS | DMIFNWYFDV | SEQ ID | SEQ ID | SASSSVGYMH | DTFKLAS | FQGSGYPFT |
| | NO: 232 | NO: 55 | (SEQ ID NO: 10) | (SEQ ID NO: 2) | (SEQ ID NO: 29) | NO: 233 | NO: 56 | (SEQ ID NO: 14) | (SEQ ID | (SEQ ID NO: 6) |
| | | | | | | | | | NO: 15) | |
| *M3H9 | SEQ ID | SEQ ID | TAGMSVG | DIWWDDKKDYNPSLKS | DMIFNWYFDV | SEQ ID | SEQ ID | SASSSVGYMH | DTYKQTS | FQGSGYPFT |
| | NO: 234 | NO: 55 | (SEQ ID NO: 10) | (SEQ ID NO: 2) | (SEQ ID NO: 29) | NO: 235 | NO: 70 | (SEQ ID NO: 14) | (SEQ ID | (SEQ ID NO: 6) |
| | | | | | | | | | NO: 57) | |
| *Y10H6 | SEQ ID | SEQ ID | TAGMSVG | DIWWDDKKDYNPSLKS | DMIFNWYFDV | SEQ ID | SEQ ID | SASSSVGYMH | DTRYLSS | FQGSGYPFT |
| | NO: 236 | NO: 55 | (SEQ ID NO: 10) | (SEQ ID NO: 2) | (SEQ ID NO: 29) | NO: 237 | NO: 58 | (SEQ ID NO: 14) | (SEQ ID | (SEQ ID NO: 6) |
| | | | | | | | | | NO: 59) | |
| *DG (aka | SEQ ID | SEQ ID | TAGMSVG | DIWWDDKKDYNPSLKS | DMITNFYFDV | SEQ ID | SEQ ID | SASSSVGYMH | DTFKLAS | FQGSGYPFT |
| D95/G93) | NO: 238 | NO: 78 | (SEQ ID NO: 10) | (SEQ ID NO: 2) | (SEQ ID NO: 79) | NO: 239 | NO: 56 | (SEQ ID NO: 14) | (SEQ ID NO: 15) | (SEQ ID NO: 6) |
| AFFF(1) | SEQ ID | SEQ ID | TAGMSVG | DIWWDDKKDYNPSLKS | SMITNFYFDV | SEQ ID | SEQ ID | SASSSVGYMH | DTFKLAS | FQGSFYPFT |
| | NO: 240 | NO: 9 | (SEQ ID NO: 10) | (SEQ ID NO: 2) | (SEQ ID NO: 12) | NO: 241 | NO: 60 | (SEQ ID NO: 14) | (SEQ ID | (SEQ ID |
| | | | | | | | | | NO: 15) | NO: 61) |
| *6H8 | SEQ ID | SEQ ID | TAGMSVG | DIWWDDKKDYNPSLKS | DMITNFYFDV | SEQ ID | SEQ ID | SASSSVGYMH | DTFKLTS | FQGSGYPFT |
| | NO: 242 | NO: 78 | (SEQ ID NO: 10) | (SEQ ID NO: 2) | (SEQ ID NO: 79) | NO: 243 | NO: 62 | (SEQ ID NO: 14) | (SEQ ID | (SEQ ID NO: 6) |
| | | | | | | | | | NO: 63) | |
| *L1-7E5 | SEQ ID | SEQ ID | TAGMSVG | DIWWDDKKDYNPSLKS | DMITNFYFDV | SEQ ID | SEQ ID | SASSRVGYMH | DTFKLAS | FQGSGYPFT |
| | NO: 244 | NO: 78 | (SEQ ID NO: 10) | (SEQ ID NO: 2) | (SEQ ID NO: 79) | NO: 245 | NO: 64 | (SEQ ID NO: 39) | (SEQ ID | (SEQ ID NO: 6) |
| | | | | | | | | | NO: 15) | |
| *L2-15B10 | SEQ ID | SEQ ID | TAGMSVG | DIWWDDKKDYNPSLKS | DMITNFYFDV | SEQ ID | SEQ ID | SASSSVGYMH | DTFRLAS | FQGSGYPFT |
| | NO: 246 | NO: 78 | (SEQ ID NO: 10) | (SEQ ID NO: 2) | (SEQ ID NO: 79) | NO: 247 | NO: 65 | (SEQ ID NO: 14) | (SEQ ID | (SEQ ID NO: 6) |
| | | | | | | | | | NO: 66) | |
| *A13a11 | SEQ ID | SEQ ID | TAGMSVG | DIWWDDKKHYNPSLKD | DMIFNWYFDV | SEQ ID | SEQ ID | SPSSRVGYMH | DTYRHSS | FQGSGYPFT |
| | NO: 248 | NO: 67 | (SEQ ID NO: 10) | (SEQ ID NO: 19) | (SEQ ID NO: 29) | NO: 249 | NO: 68 | (SEQ ID NO: 31) | (SEQ ID | (SEQ ID NO: 6) |
| | | | | | | | | | NO: 69) | |
| *A1h5 | SEQ ID | SEQ ID | TAGMSVG | DIWWDGKKHYNPSLKD | DMIFNWYFDV | SEQ ID | SEQ ID | SLSSSVGYMH | DTFFHRS | FQGSGYPFT |
| | NO: 250 | NO: 33 | (SEQ ID NO: 10) | (SEQ ID NO: 25) | (SEQ ID NO: 29) | NO: 251 | NO: 71 | (SEQ ID NO: 72) | (SEQ ID | (SEQ ID NO: 6) |
| | | | | | | | | | NO: 73) | |
| A4B4(1) | SEQ ID | SEQ ID | TAGMSVG | DIWWDDKKHYNPSLKD | DMIFNFYFDV | SEQ ID | SEQ ID | SASSRVGYMH | DTLLLDS | FQGSGYPFT |
| | NO: 252 | NO: 48 | (SEQ ID NO: 10) | (SEQ ID NO: 19) | (SEQ ID NO: 20) | NO: 253 | NO: 74 | (SEQ ID NO: 39) | (SEQ ID | (SEQ ID NO: 6) |
| | | | | | | | | | NO: 75) | |
| ***A4B4L1F | SEQ ID | SEQ ID | TAGMSVG | DIWWDDKKHYNPSLKD | DMIFNFYFDV | SEQ ID | SEQ ID | SASSRVGYMH | DTSKLAS | FQGSGYPFT |
| R-S28R (aka | NO: 254 | NO: 48 | (SEQ ID NO: 10) | (SEQ ID NO: 19) | (SEQ ID NO: 20) | NO: 255 | NO: 11 | (SEQ ID NO: 39) | (SEQ ID NO: 5) | (SEQ ID NO: 6) |
| MEDI-524) | | | | | | | | | | |
| ***A4B4- | SEQ ID | SEQ ID | TAGMSVG | DIWWDDKKHYNPSLKD | DMIFNFYFDV | SEQ ID | SEQ ID | SASSRVGYMH | DTSFLDS | FQGSGYPFT |
| F52S | NO: 256 | NO: 48 | (SEQ ID NO: 10) | (SEQ ID NO: 19) | (SEQ ID NO: 20) | NO: 257 | NO: 76 | (SEQ ID NO: 39) | (SEQ ID | (SEQ ID NO: 6) |
| | | | | | | | | | NO: 77) | |
| ***A17d4(1) | SEQ ID | SEQ ID | TAGMSVG | DIWWDGKKSYNPSLKD | DMIFNFYFDV | SEQ ID | SEQ ID | LPSSRVGYMH | DTMYQSS | FQGSGYPFT |
| | NO: 222 | NO: 40 | (SEQ ID NO: 10) | (SEQ ID NO: 41) | (SEQ ID NO: 20) | NO: 225 | NO: 46 | (SEQ ID NO: 47) | (SEQ ID | (SEQ ID NO: 6) |
| | | | | | | | | | NO: 43) | |
| ***A3e2 | SEQ ID | SEQ ID | TAGMSVG | DIWWGDKGHYNPSLKD | DMIFNWYFDV | SEQ ID | SEQ ID | SASSSVGYMH | DTFYLHS | FQGSGYPFT |
| | NO: 303 | NO: 304 | (SEQ ID NO: 10) | (SEQ ID NO: 305) | (SEQ ID NO: 29) | NO: 306 | NO: 307 | (SEQ ID NO: 14) | (SEQ ID | (SEQ ID NO: 6) |
| | | | | | | | | | NO: 308) | |
| ***A14a4 | SEQ ID | SEQ ID | TAGMSVG | DIWWDDKKSYNPSLKD | DMITNWYFDV | SEQ ID | SEQ ID | LLSSRVGYMH | DTYYQTS | FQGSGYPFT |
| | NO: 309 | NO: 310 | (SEQ ID NO: 10) | (SEQ ID NO: 45) | (SEQ ID NO: 311) | NO: 312 | NO: 313 | (SEQ ID NO: 314) | (SEQ ID | (SEQ ID NO: 6) |
| | | | | | | | | | NO: 315) | |
| ***A16b4 | SEQ ID | SEQ ID | TAGMSVG | DIWWDDKKHYNPSLKD | DMIFNWYFDV | SEQ ID | SEQ ID | LLSSRVGYMH | DTMYQAS | FQGSGYPFT |
| | NO: 316 | NO: 317 | (SEQ ID NO: 10) | (SEQ ID NO: 19) | (SEQ ID NO: 29) | NO: 318 | NO: 319 | (SEQ ID NO: 320) | (SEQ ID | (SEQ ID NO: 6) |
| | | | | | | | | | NO: 321) | |
| ***A17b5 | SEQ ID | SEQ ID | TAGMSVG | DIWWDDKKHYNPSLKD | DMIFNWYFDV | SEQ ID | SEQ ID | SLSSRVGYMH | DTYYLPS | FQGSGYPFT |
| | NO: 322 | NO: 323 | (SEQ ID NO: 10) | (SEQ ID NO: 19) | (SEQ ID NO: 29) | NO: 324 | NO: 325 | (SEQ ID NO: 22) | (SEQ ID | (SEQ ID NO: 6) |
| | | | | | | | | | NO: 326) | |
| ***A17f5 | SEQ ID | SEQ ID | TAGMSVG | DIWWDDKKDYNPSLKD | DMIFNWYFDV | SEQ ID | SEQ ID | SLSSRVGYMH | DTFRHTS | FQGSGYPFT |
| | NO: 327 | NO: 328 | (SEQ ID NO: 10) | (SEQ ID NO: 329) | (SEQ ID NO: 29) | NO: 330 | NO: 331 | (SEQ ID NO: 22) | (SEQ ID | (SEQ ID NO: 6) |
| | | | | | | | | | NO: 332) | |
| ***A17h4 | SEQ ID | SEQ ID | TAGMSVG | DIWWDGKKHYNPSLKD | DMIFNWYFDV | SEQ ID | SEQ ID | SPSSSVGYMH | DTYYLAS | FQGSGYPFT |
| | NO: 218 | NO: 33 | (SEQ ID NO: 10) | (SEQ ID NO: 25) | (SEQ ID NO: 29) | NO: 333 | NO: 334 | (SEQ ID NO: 335) | (SEQ ID | (SEQ ID NO: 6) |
| | | | | | | | | | NO: 336) | |

Bold faced and underlined amino acid residues are the residues which differ from the amino acid sequence in palivizumab; Fab fragment produced (*); Monoclonal antibody produced (**); Fab fragment & monoclonal antibody produced (***)

[0190] TABLE 3A
VH CDR1 Sequences

TSGMSVG (SEQ ID NO: 1)
TAGMSVG (SEQ ID NO: 10)
TPGMSVG (SEQ ID NO: 18)
Bold faced & underlined amino acid residues are the residues which differ from the amino acid sequence in palivizumab

[0191] TABLE 3B
VH CDR2 Sequences

| | |
|---|---|
| DIWWDDKKDYNPSLKS (SEQ ID NO: 2) | DIWWDGKKDYNPSLKS (SEQ ID NO: 100) |
| DIWWDDKKDYNPSLKD (SEQ ID NO: 86) | DIWWDGKKDYNPSLKD (SEQ ID NO: 103) |
| DIWWDDKKHYNPSLKS (SEQ ID NO: 82) | DIWWDGKKHYNPSLKS (SEQ ID NO: 106) |
| DIWWDDKKHYNPSLKD (SEQ ID NO: 19) | DIWWDGKKHYNPSLKD (SEQ ID NO: 25) |
| DIWWDDKKSYNPSLKS (SEQ ID NO: 109) | DIWWDGKKSYNPSLKS (SEQ ID NO: 114) |
| DIWWDDKKSYNPSLKD (SEQ ID NO: 111) | DIWWDGKKSYNPSLKD (SEQ ID NO: 41) |
| DIWWDDKGDYNPSLKS (SEQ ID NO: 384) | DIWWDGKGDYNPSLKS (SEQ ID NO: 390) |
| DIWWDDKGDYNPSLKD (SEQ ID NO: 385) | DIWWDGKGDYNPSLKD (SEQ ID NO: 391) |
| DIWWDDKGHYNPSLKS (SEQ ID NO: 386) | DIWWDGKGHYNPSLKS (SEQ ID NO: 392) |
| DIWWDDKGHYNPSLKD (SEQ ID NO: 387) | DIWWDGKGHYNPSLKD (SEQ ID NO: 393) |
| DIWWDDKGSYNPSLKS (SEQ ID NO: 388) | DIWWDGKGSYNPSLKS (SEQ ID NO: 394) |
| DIWWDDKGSYNPSLKD (SEQ ID NO: 389) | DIWWDGKGSYNPSLKD (SEQ ID NO: 395) |

Bold faced & underlined amino acid residues are the residues which differ from the amino acid sequence in palivizumab

[0192] TABLE 3C
VH CDR3 Sequences

| | |
|---|---|
| SMITNWYFDV (SEQ ID NO: 3) | DMITNWYFDV (SEQ ID NO: 83) |
| SMITNFYFDV (SEQ ID NO: 12) | DMITNFYFDV (SEQ ID NO: 29) |
| SMIFNWYFDV (SEQ ID NO: 94) | DMIFNWYFDV (SEQ ID NO: 79) |
| SMIFNFYFDV (SEQ ID NO: 97) | DMIFNFYFDV (SEQ ID NO: 20) |

Bold faced & underlined amino acid residues are the residues which differ from the amino acid sequence in palivizumab

[0193] TABLE 3D
VL CDR1 Sequences

| | | |
|---|---|---|
| KCQLSVGYMH (SEQ ID NO: 4) | SCQLSVGYMH (SEQ ID NO: 127) | LCQLSVGYMH (SEQ ID NO: 204) |
| KCQLRVGYMH (SEQ ID NO: 87) | SCQLRVGYMH (SEQ ID NO: 132) | LCQLRVGYMH (SEQ ID NO: 206) |
| KCQLFVGYMH (SEQ ID NO: 396) | SCQLFVGYMH (SEQ ID NO: 436) | LCQLFVGYMH (SEQ ID NO: 476) |
| KCQSSVGYMH (SEQ ID NO: 80) | SCQSSVGYMH (SEQ ID NO: 129) | LCQSSVGYMH (SEQ ID NO: 205) |
| KCQSRVGYMH (SEQ ID NO: 84) | SCQSRVGYMH (SEQ ID NO: 130) | LCQSRVGYMH (SEQ ID NO: 203) |
| KCQSFVGYMH (SEQ ID NO: 397) | SCQSFVGYMH (SEQ ID NO: 437) | LCQSFVGYMH (SEQ ID NO: 477) |
| KCQVSVGYMH (SEQ ID NO: 398) | SCQVSVGYMH (SEQ ID NO: 438) | LCQVSVGYMH (SEQ ID NO: 478) |
| KCQVRVGYMH (SEQ ID NO: 399) | SCQVRVGYMH (SEQ ID NO: 439) | LCQVRVGYMH (SEQ ID NO: 479) |
| KCQVFVGYMH (SEQ ID NO: 400) | SCQVFVGYMH (SEQ ID NO: 440) | LCQVFVGYMH (SEQ ID NO: 480) |
| KCSLSVGYMH (SEQ ID NO: 112) | SCSLSVGYMH (SEQ ID NO: 142) | LCSLSVGYMH (SEQ ID NO: 196) |
| KCSLRVGYMH (SEQ ID NO: 119) | SCSLRVGYMH (SEQ ID NO: 148) | LCSLRVGYMH (SEQ ID NO: 198) |
| KCSLFVGYMH (SEQ ID NO: 401) | SCSLFVGYMH (SEQ ID NO: 441) | LCSLFVGYMH (SEQ ID NO: 481) |
| KCSSSVGYMH (SEQ ID NO: 115) | SCSSSVGYMH (SEQ ID NO: 144) | LCSSSVGYMH (SEQ ID NO: 197) |
| KCSSRVGYMH (SEQ ID NO: 117) | SCSSRVGYMH (SEQ ID NO: 146) | LCSSRVGYMH (SEQ ID NO: 195) |
| KCSSFVGYMH (SEQ ID NO: 402) | SCSSFVGYMH (SEQ ID NO: 442) | LCSSFVGYMH (SEQ ID NO: 482) |
| KCSVSVGYMH (SEQ ID NO: 403) | SCSVSVGYMH (SEQ ID NO: 443) | LCSVSVGYMH (SEQ ID NO: 483) |
| KCSVRVGYMH (SEQ ID NO: 404) | SCSVRVGYMH (SEQ ID NO: 444) | LCSVRVGYMH (SEQ ID NO: 484) |
| KCSVFVGYMH (SEQ ID NO: 405) | SCSVFVGYMH (SEQ ID NO: 445) | LCSVFVGYMH (SEQ ID NO: 485) |
| KAQLSVGYMH (SEQ ID NO: 182) | SAQLSVGYMH (SEQ ID NO: 207) | LAQLSVGYMH (SEQ ID NO: 486) |
| KAQLRVGYMH (SEQ ID NO: 180) | SAQLRVGYMH (SEQ ID NO: 190) | LAQLRVGYMH (SEQ ID NO: 487) |
| KAQLFVGYMH (SEQ ID NO: 406) | SAQLFVGYMH (SEQ ID NO: 446) | LAQLFVGYMH (SEQ ID NO: 488) |
| KAQSSVGYMH (SEQ ID NO: 181) | SAQSSVGYMH (SEQ ID NO: 191) | LAQSSVGYMH (SEQ ID NO: 489) |
| KAQSRVGYMH (SEQ ID NO: 179) | SAQSRVGYMH (SEQ ID NO: 189) | LAQSRVGYMH (SEQ ID NO: 490) |
| KAQSFVGYMH (SEQ ID NO: 407) | SAQSFVGYMH (SEQ ID NO: 447) | LAQSFVGYMH (SEQ ID NO: 491) |
| KAQVSVGYMH (SEQ ID NO: 408) | SAQVSVGYMH (SEQ ID NO: 448) | LAQVSVGYMH (SEQ ID NO: 492) |
| KAQVRVGYMH (SEQ ID NO: 409) | SAQVRVGYMH (SEQ ID NO: 449) | LAQVRVGYMH (SEQ ID NO: 493) |
| KAQVFVGYMH (SEQ ID NO: 410) | SAQVFVGYMH (SEQ ID NO: 450) | LAQVFVGYMH (SEQ ID NO: 494) |
| KASLSVGYMH (SEQ ID NO: 186) | SASLSVGYMH (SEQ ID NO: 188) | LASLSVGYMH (SEQ ID NO: 495) |
| KASLRVGYMH (SEQ ID NO: 184) | SASLRVGYMH (SEQ ID NO: 187) | LASLRVGYMH (SEQ ID NO: 496) |
| KASLFVGYMH (SEQ ID NO: 411) | SASLFVGYMH (SEQ ID NO: 451) | LASLFVGYMH (SEQ ID NO: 497) |
| KASSSVGYMH (SEQ ID NO: 185) | SASSSVGYMH (SEQ ID NO: 14) | LASSSVGYMH (SEQ ID NO: 498) |
| KASSRVGYMH (SEQ ID NO: 183) | SASSRVGYMH (SEQ ID NO: 39) | LASSRVGYMH (SEQ ID NO: 499) |
| KASSFVGYMH (SEQ ID NO: 412) | SASSFVGYMH (SEQ ID NO: 452) | LASSFVGYMH (SEQ ID NO: 500) |
| KASVSVGYMH (SEQ ID NO: 413) | SASVSVGYMH (SEQ ID NO: 453) | LASVSVGYMH (SEQ ID NO: 501) |
| KASVRVGYMH (SEQ ID NO: 414) | SASVRVGYMH (SEQ ID NO: 454) | LASVRVGYMH (SEQ ID NO: 502) |
| KASVFVGYMH (SEQ ID NO: 415) | SASVFVGYMH (SEQ ID NO: 455) | LASVFVGYMH (SEQ ID NO: 503) |
| KLQLSVGYMH (SEQ ID NO: 89) | SLQLSVGYMH (SEQ ID NO: 134) | LLQLSVGYMH (SEQ ID NO: 504) |
| KLQLRVGYMH (SEQ ID NO: 98) | SLQLRVGYMH (SEQ ID NO: 140) | LLQLRVGYMH (SEQ ID NO: 505) |
| KLQLFVGYMH (SEQ ID NO: 416) | SLQLFVGYMH (SEQ ID NO: 456) | LLQLFVGYMH (SEQ ID NO: 506) |
| KLQSSVGYMH (SEQ ID NO: 92) | SLQSSVGYMH (SEQ ID NO: 136) | LLQSSVGYMH (SEQ ID NO: 507) |
| KLQSRVGYMH (SEQ ID NO: 95) | SLQSRVGYMH (SEQ ID NO: 138) | LLQSRVGYMH (SEQ ID NO: 508) |
| KLQSFVGYMH (SEQ ID NO: 417) | SLQSFVGYMH (SEQ ID NO: 457) | LLQSFVGYMH (SEQ ID NO: 509) |
| KLQVSVGYMH (SEQ ID NO: 418) | SLQVSVGYMH (SEQ ID NO: 458) | LLQVSVGYMH (SEQ ID NO: 510) |
| KLQVRVGYMH (SEQ ID NO: 419) | SLQVRVGYMH (SEQ ID NO: 459) | LLQVRVGYMH (SEQ ID NO: 511) |
| KLQVFVGYMH (SEQ ID NO: 420) | SLQVFVGYMH (SEQ ID NO: 460) | LLQVFVGYMH (SEQ ID NO: 512) |
| KLSLSVGYMH (SEQ ID NO: 101) | SLSLSVGYMH (SEQ ID NO: 120) | LLSLSVGYMH (SEQ ID NO: 513) |
| KLSLRVGYMH (SEQ ID NO: 110) | SLSLRVGYMH (SEQ ID NO: 125) | LLSLRVGYMH (SEQ ID NO: 514) |
| KLSLFVGYMH (SEQ ID NO: 421) | SLSLFVGYMH (SEQ ID NO: 461) | LLSLFVGYMH (SEQ ID NO: 515) |
| KLSSSVGYMH (SEQ ID NO: 104) | SLSSSVGYMH (SEQ ID NO: 122) | LLSSSVGYMH (SEQ ID NO: 516) |
| KLSSRVGYMH (SEQ ID NO: 107) | SLSSRVGYMH (SEQ ID NO: 22) | LLSSRVGYMH (SEQ ID NO: 517) |
| KLSSFVGYMH (SEQ ID NO: 422) | SLSSFVGYMH (SEQ ID NO: 462) | LLSSFVGYMH (SEQ ID NO: 518) |
| KLSVSVGYMH (SEQ ID NO: 423) | SLSVSVGYMH (SEQ ID NO: 463) | LLSVSVGYMH (SEQ ID NO: 519) |
| KLSVRVGYMH (SEQ ID NO: 424) | SLSVRVGYMH (SEQ ID NO: 464) | LLSVRVGYMH (SEQ ID NO: 520) |
| KLSVFVGYMH (SEQ ID NO: 425) | SLSVFVGYMH (SEQ ID NO: 465) | LLSVFVGYMH (SEQ ID NO: 521) |
| KPQLSVGYMH (SEQ ID NO: 163) | SPQLSVGYMH (SEQ ID NO: 177) | LPQLSVGYMH (SEQ ID NO: 200) |
| KPQLRVGYMH (SEQ ID NO: 159) | SPQLRVGYMH (SEQ ID NO: 173) | LPQLRVGYMH (SEQ ID NO: 202) |
| KPQLFVGYMH (SEQ ID NO: 426) | SPQLFVGYMH (SEQ ID NO: 466) | LPQLFVGYMH (SEQ ID NO: 522) |
| KPQSSVGYMH (SEQ ID NO: 161) | SPQSSVGYMH (SEQ ID NO: 176) | LPQSSVGYMH (SEQ ID NO: 201) |
| KPQSRVGYMH (SEQ ID NO: 157) | SPQSRVGYMH (SEQ ID NO: 171) | LPQSRVGYMH (SEQ ID NO: 199) |
| KPQSFVGYMH (SEQ ID NO: 427) | SPQSFVGYMH (SEQ ID NO: 467) | LPQSFVGYMH (SEQ ID NO: 523) |
| KPQVSVGYMH (SEQ ID NO: 428) | SPQVSVGYMH (SEQ ID NO: 468) | LPQVSVGYMH (SEQ ID NO: 524) |
| KPQVRVGYMH (SEQ ID NO: 429) | SPQVRVGYMH (SEQ ID NO: 469) | LPQVRVGYMH (SEQ ID NO: 525) |
| KPQVFVGYMH (SEQ ID NO: 430) | SPQVFVGYMH (SEQ ID NO: 470) | LPQVFVGYMH (SEQ ID NO: 526) |
| KPSLSVGYMH (SEQ ID NO: 155) | SPSLSVGYMH (SEQ ID NO: 169) | LPSLSVGYMH (SEQ ID NO: 192) |
| KPSLRVGYMH (SEQ ID NO: 152) | SPSLRVGYMH (SEQ ID NO: 166) | LPSLRVGYMH (SEQ ID NO: 194) |
| KPSLFVGYMH (SEQ ID NO: 431) | SPSLFVGYMH (SEQ ID NO: 471) | LPSLFVGYMH (SEQ ID NO: 527) |
| KPSSSVGYMH (SEQ ID NO: 153) | SPSSSVGYMH (SEQ ID NO: 168) | LPSSSVGYMH (SEQ ID NO: 193) |
| KPSSRVGYMH (SEQ ID NO: 150) | SPSSRVGYMH (SEQ ID NO: 31) | LPSSRVGYMH (SEQ ID NO: 47) |
| KPSSFVGYMH (SEQ ID NO: 432) | SPSSFVGYMH (SEQ ID NO: 472) | LPSSFVGYMH (SEQ ID NO: 528) |
| KPSVSVGYMH (SEQ ID NO: 433) | SPSVSVGYMH (SEQ ID NO: 473) | LPSVSVGYMH (SEQ ID NO: 529) |
| KPSVRVGYMH (SEQ ID NO: 434) | SPSVRVGYMH (SEQ ID NO: 474) | LPSVRVGYMH (SEQ ID NO: 530) |
| KPSVFVGYMH (SEQ ID NO: 435) | SPSVFVGYMH (SEQ ID NO: 475) | LPSVFVGYMH (SEQ ID NO: 531) |

Bold faced & underlined amino acid residues are the residues which differ from the amino acid sequence in palivizumab

[0194] TABLE 3E
VL CDR2 Sequences

| | | | | | | |
|---|---|---|---|---|---|---|
| DTSKLAS (SEQ | DTFKLAS (SEQ | DTYKLAS (SEQ | DTRKLAS (SEQ | DTMKLAS (SEQ | DTKKLAS (SEQ | DTLKLAS (SEQ |
| ID NO: 5) | ID NO: 15) | ID NO: 799) | ID | ID | ID NO: 1211) | ID NO: 135) |
| | | | NOS: 113&174) | NOS: 121&162) | | |
| DTSKLSS (SEQ | DTFKLSS (SEQ | DTYKLSS (SEQ | DTRKLSS (SEQ | DTMKLSS (SEQ | DTKKLSS (SEQ | DTLKLSS (SEQ |
| ID NO: 165) | ID NO: 96) | ID NO: 800) | ID NO: 175) | ID NO: 164) | ID NO: 1212) | ID NO: 1355) |
| DTSKLKS (SEQ | DTFKLKS (SEQ | DTYKLKS (SEQ | DTRKLKS (SEQ | DTMKLKS (SEQ | DTKKLKS (SEQ | DTLKLKS (SEQ |
| ID NO: 532) | ID NO: 660) | ID NO: 801) | ID NO: 943) | ID NO: 1076) | ID NO: 1213) | ID NO: 1356) |
| DTSKLRS (SEQ | DTFKLRS (SEQ | DTYKLRS (SEQ | DTRKLRS (SEQ | DTMKLRS (SEQ | DTKKLRS (SEQ | DTLKLRS (SEQ |
| ID NO: 533) | ID NO: 661) | ID NO: 802) | ID NO: 944) | ID NO: 1077) | ID NO: 1214) | ID NO: 1357) |
| DTSKLHS (SEQ | DTFKLHS (SEQ | DTYKLHS (SEQ | DTRKLHS (SEQ | DTMKLHS (SEQ | DTKKLHS (SEQ | DTLKLHS (SEQ |
| ID NO: 534) | ID NO: 662) | ID NO: 803) | ID NO: 945) | ID NO: 1078) | ID NO: 1215) | ID NO: 1358) |
| DTSKLPS (SEQ | DTFKLPS (SEQ | DTYKLPS (SEQ | DTRKLPS (SEQ | DTMKLPS (SEQ | DTKKLPS (SEQ | DTLKLPS (SEQ |
| ID NO: 102) | ID NO: 663) | ID NO: 804) | ID NO: 118) | ID NO: 1079) | ID NO: 1216) | ID NO: 1359) |
| DTSKLTS (SEQ | DTFKLTS (SEQ | DTYKLTS (SEQ | DTRKLTS (SEQ | DTMKLTS (SEQ | DTKKLTS (SEQ | DTLKLTS (SEQ |
| ID NO: 535) | ID NO: 664) | ID NO: 805) | ID NO: 946) | ID NO: 1080) | ID NO: 1217) | ID NO: 1360) |
| DTSKLDS (SEQ | DTFKLDS (SEQ | DTYKLDS (SEQ | DTRKLDS (SEQ | DTMKLDS (SEQ | DTKKLDS (SEQ | DTLKLDS (SEQ |
| ID NO: 128) | ID NO: 665) | ID NO: 806) | ID NO: 947) | ID NO: 1081) | ID NO: 1218) | ID NO: 131) |
| DTSKHAS (SEQ | DTFKHAS (SEQ | DTYKHAS (SEQ | DTRKHAS (SEQ | DTMKHAS (SEQ | DTKKHAS (SEQ | DTLKHAS (SEQ |
| ID NO: 536) | ID NO: 666) | ID NO: 807) | ID NO: 948) | ID NO: 1082) | ID NO: 1219) | ID NO: 1361) |
| DTSKHSS (SEQ | DTFKHSS (SEQ | DTYKHSS (SEQ | DTRKHSS (SEQ | DTMKHSS (SEQ | DTKKHSS (SEQ | DTLKHSS (SEQ |
| ID NO: 537) | ID NO: 667) | ID NO: 808) | ID NO: 949) | ID NO: 1083) | ID NO: 1220) | ID NO: 1362) |
| DTSKHKS (SEQ | DTFKHKS (SEQ | DTYKHKS (SEQ | DTRKHKS (SEQ | DTMKHKS (SEQ | DTKKHKS (SEQ | DTLKHKS (SEQ |
| ID NO: 538) | ID NO: 668) | ID NO: 809) | ID NO: 950) | ID NO: 1084) | ID NO: 1221) | ID NO: 1363) |
| DTSKHRS (SEQ | DTFKHRS (SEQ | DTYKHRS (SEQ | DTRKHRS (SEQ | DTMKHRS (SEQ | DTKKHRS (SEQ | DTLKHRS (SEQ |
| ID NO: 539) | ID NO: 669) | ID NO: 810) | ID NO: 951) | ID NO: 1085) | ID NO: 1222) | ID NO: 1364) |
| DTSKHHS (SEQ | DTFKHHS (SEQ | DTYKHHS (SEQ | DTRKHHS (SEQ | DTMKHHS (SEQ | DTKKHHS (SEQ | DTLKHHS (SEQ |
| ID NO: 540) | ID NO: 670) | ID NO: 811) | ID NO: 952) | ID NO: 1086) | ID NO: 1223) | ID NO: 1365) |
| DTSKHPS (SEQ | DTFKHPS (SEQ | DTYKHPS (SEQ | DTRKHPS (SEQ | DTMKHPS (SEQ | DTKKHPS (SEQ | DTLKHPS (SEQ |
| ID NO: 541) | ID NO: 671) | ID NO: 812) | ID NO: 953) | ID NO: 1087) | ID NO: 1224) | ID NO: 1366) |
| DTSKHTS (SEQ | DTFKHTS (SEQ | DTYKHTS (SEQ | DTRKHTS (SEQ | DTMKHTS (SEQ | DTKKHTS (SEQ | DTLKHTS (SEQ |
| ID NO: 542) | ID NO: 672) | ID NO: 813) | ID NO: 954) | ID NO: 1088) | ID NO: 1225) | ID NO: 1367) |
| DTSKHDS (SEQ | DTFKHDS (SEQ | DTYKHDS (SEQ | DTRKHDS (SEQ | DTMKHDS (SEQ | DTKKHDS (SEQ | DTLKHDS (SEQ |
| ID NO: 543) | ID NO: 673) | ID NO: 814) | ID NO: 955) | ID NO: 1089) | ID NO: 1226) | ID NO: 1368) |
| DTSKQAS (SEQ | DTFKQAS (SEQ | DTYKQAS (SEQ | DTRKQAS (SEQ | DTMKQAS (SEQ | DTKKQAS (SEQ | DTLKQAS (SEQ |
| ID NO: 139) | ID NO: 674) | ID NO: 815) | ID NO: 170) | ID NO: 154) | ID NO: 1227) | ID NO: 1369) |
| DTSKQSS (SEQ | DTFKQSS (SEQ | DTYKQSS (SEQ | DTRKQSS (SEQ | DTMKQSS (SEQ | DTKKQSS (SEQ | DTLKQSS (SEQ |
| ID NO: 141) | ID NO: 675) | ID NO: 816) | ID NO: 172) | ID NO: 156) | ID NO: 1228) | ID NO: 1370) |
| DTSKQKS (SEQ | DTFKQKS (SEQ | DTYKQKS (SEQ | DTRKQKS (SEQ | DTMKQKS (SEQ | DTKKQKS (SEQ | DTLKQKS (SEQ |
| ID NO: 544) | ID NO: 676) | ID NO: 817) | ID NO: 956) | ID NO: 1090) | ID NO: 1229) | ID NO: 1371) |
| DTSKQRS (SEQ | DTFKQRS (SEQ | DTYKQRS (SEQ | DTRKQRS (SEQ | DTMKQRS (SEQ | DTKKQRS (SEQ | DTLKQRS (SEQ |
| ID NO: 545) | ID NO: 677) | ID NO: 818) | ID NO: 957) | ID NO: 1091) | ID NO: 1230) | ID NO: 1372) |
| DTSKQHS (SEQ | DTFKQHS (SEQ | DTYKQHS (SEQ | DTRKQHS (SEQ | DTMKQHS (SEQ | DTKKQHS (SEQ | DTLKQHS (SEQ |
| ID NO: 546) | ID NO: 678) | ID NO: 819) | ID NO: 958) | ID NO: 1092) | ID NO: 1231) | ID NO: 1373) |
| DTSKQPS (SEQ | DTFKQPS (SEQ | DTYKQPS (SEQ | DTRKQPS (SEQ | DTMKQPS (SEQ | DTKKQPS (SEQ | DTLKQPS (SEQ |
| ID NO: 547) | ID NO: 679) | ID NO: 820) | ID NO: 959) | ID NO: 1093) | ID NO: 1232) | ID NO: 1374) |
| DTSKQTS (SEQ | DTFKQTS (SEQ | DTYKQTS (SEQ | DTRKQTS (SEQ | DTMKQTS (SEQ | DTKKQTS (SEQ | DTLKQTS (SEQ |
| ID NO: 548) | ID NO: 680) | ID NO: 821) | ID NO: 960) | ID NO: 1094) | ID NO: 1233) | ID NO: 1375) |
| DTSKQDS (SEQ | DTFKQDS (SEQ | DTYKQDS (SEQ | DTRKQDS (SEQ | DTMKQDS (SEQ | DTKKQDS (SEQ | DTLKQDS (SEQ |
| ID NO: 549) | ID NO: 681) | ID NO: 822) | ID NO: 961) | ID NO: 1095) | ID NO: 1234) | ID NO: 1376) |
| DTSGLAS (SEQ | DTFGLAS (SEQ | DTYGLAS (SEQ | DTRGLAS (SEQ | DTMGLAS (SEQ | DTKGLAS (SEQ | DTLGLAS (SEQ |
| ID NO: 105) | ID NO: 682) | ID NO: 823) | ID NO: 116) | ID NO: 1096) | ID NO: 1235) | ID NO: 1377) |
| DTSGLSS (SEQ | DTFGLSS (SEQ | DTYGLSS (SEQ | DTRGLSS (SEQ | DTMGLSS (SEQ | DTKGLSS (SEQ | DTLGLSS (SEQ |
| ID NO: 550) | ID NO: 683) | ID NO: 824) | ID NO: 962) | ID NO: 1097) | ID NO: 1236) | ID NO: 1378) |
| DTSGLKS (SEQ | DTFGLKS (SEQ | DTYGLKS (SEQ | DTRGLKS (SEQ | DTMGLKS (SEQ | DTKGLKS (SEQ | DTLGLKS (SEQ |
| ID NO: 551) | ID NO: 684) | ID NO: 825) | ID NO: 963) | ID NO: 1098) | ID NO: 1237) | ID NO: 1379) |
| DTSGLRS (SEQ | DTFGLRS (SEQ | DTYGLRS (SEQ | DTRGLRS (SEQ | DTMGLRS (SEQ | DTKGLRS (SEQ | DTLGLRS (SEQ |
| ID NO: 552) | ID NO: 685) | ID NO: 826) | ID NO: 964) | ID NO: 1099) | ID NO: 1238) | ID NO: 1380) |
| DTSGLHS (SEQ | DTFGLHS (SEQ | DTYGLHS (SEQ | DTRGLHS (SEQ | DTMGLHS (SEQ | DTKGLHS (SEQ | DTLGHS (SEQ |
| ID NO: 553) | ID NO: 686) | ID NO: 827) | ID NO: 965) | ID NO: 1100) | ID NO: 1239) | ID NO: 1381) |
| DTSGLPS (SEQ | DTFGLPS (SEQ | DTYGLPS (SEQ | DTRGLPS (SEQ | DTMGLPS (SEQ | DTKGLPS (SEQ | DTLGLPS (SEQ |
| ID NO: 108) | ID NO: 687) | ID NO: 828) | ID NO: 27) | ID NO: 1101) | ID NO: 1240) | ID NO: 1382) |
| DTSGLTS (SEQ | DTFGLTS (SEQ | DTYGLTS (SEQ | DTRGLTS (SEQ | DTMGLTS (SEQ | DTKGLTS (SEQ | DTLGLTS (SEQ |
| ID NO: 554) | ID NO: 688) | ID NO: 829) | ID NO: 966) | ID NO: 1102) | ID NO: 1241) | ID NO: 1383) |
| DTSGLDS (SEQ | DTFGLDS (SEQ | DTYGLDS (SEQ | DTRGLDS (SEQ | DTMGLDS (SEQ | DTKGLDS (SEQ | DTLGLDS (SEQ |
| ID NO: 555) | ID NO: 689) | ID NO: 830) | ID NO: 967) | ID NO: 1103) | ID NO: 1242) | ID NO: 1384) |
| DTSGHAS (SEQ | DTFGHAS (SEQ | DTYGHAS (SEQ | DTRGHAS (SEQ | DTMGHAS (SEQ | DTKGHAS (SEQ | DTLGHAS (SEQ |
| ID NO: 556) | ID NO: 690) | ID NO: 831) | ID NO: 968) | ID NO: 1104) | ID NO: 1243) | ID NO: 1385) |
| DTSGHSS (SEQ | DTFGHSS (SEQ | DTYGHSS (SEQ | DTRGHSS (SEQ | DTMGHSS (SEQ | DTKGHSS (SEQ | DTLGHSS (SEQ |
| ID NO: 557) | ID NO: 691) | ID NO: 832) | ID NO: 969) | ID NO: 1105) | ID NO: 1244) | ID NO: 1386) |
| DTSGHKS (SEQ | DTFGHKS (SEQ | DTYGHKS (SEQ | DTRGHKS (SEQ | DTMGHKS (SEQ | DTKGHKS (SEQ | DTLGHKS (SEQ |
| ID NO: 558) | ID NO: 692) | ID NO: 833) | ID NO: 970) | ID NO: 1106) | ID NO: 1245) | ID NO: 1387) |
| DTSGHRS (SEQ | DTFGHRS (SEQ | DTYGHRS (SEQ | DTRGHRS (SEQ | DTMGHRS (SEQ | DTKGHRS (SEQ | DTLGHRS (SEQ |
| ID NO: 559) | ID NO: 693) | ID NO: 834) | ID NO: 971) | ID NO: 1107) | ID NO: 1246) | ID NO: 1388) |
| DTSGHHS (SEQ | DTFGHHS (SEQ | DTYGHHS (SEQ | DTRGHHS (SEQ | DTMGHHS (SEQ | DTKGHHS (SEQ | DTLGHHS (SEQ |
| ID NO: 560) | ID NO: 694) | ID NO: 835) | ID NO: 972) | ID NO: 1108) | ID NO: 1247) | ID NO: 1389) |
| DTSGHPS (SEQ | DTFGHPS (SEQ | DTYGHPS (SEQ | DTRGHPS (SEQ | DTMGHPS (SEQ | DTKGHPS (SEQ | DTLGHPS (SEQ |
| ID NO: 561) | ID NO: 695) | ID NO: 836) | ID NO: 973) | ID NO: 1109) | ID NO: 1248) | ID NO: 1390) |
| DTSGHTS (SEQ | DTFGHTS (SEQ | DTYGHTS (SEQ | DTRGHTS (SEQ | DTMGHTS (SEQ | DTKGHTS (SEQ | DTLGHTS (SEQ |
| ID NO: 562) | ID NO: 696) | ID NO: 837) | ID NO: 974) | ID NO: 1110) | ID NO: 1249) | ID NO: 1391) |
| DTSGHDS (SEQ | DTFGHDS (SEQ | DTYGHDS (SEQ | DTRGHDS (SEQ | DTMGHDS (SEQ | DTKGHDS (SEQ | DTLGHDS (SEQ |
| ID NO: 563) | ID NO: 697) | ID NO: 838) | ID NO: 975) | ID NO: 1111) | ID NO: 1250) | ID NO: 1392) |
| DTSGQAS (SEQ | DTFGQAS (SEQ | DTYGQAS (SEQ | DTRGQAS (SEQ | DTMGQAS (SEQ | DTKGQAS (SEQ | DTLGQAS (SEQ |
| ID NO: 564) | ID NO: 698) | ID NO: 839) | ID NO: 976) | ID NO: 1112) | ID NO: 1251) | ID NO: 1393) |
| DTSGQSS (SEQ | DTFGQSS (SEQ | DTYGQSS (SEQ | DTRGQSS (SEQ | DTMGQSS (SEQ | DTKGQSS (SEQ | DTLGQSS (SEQ |
| ID NO: 565) | ID NO: 699) | ID NO: 840) | ID NO: 977) | ID NO: 1113) | ID NO: 1252) | ID NO: 1394) |
| DTSGQKS (SEQ | DTFGQKS (SEQ | DTYGQKS (SEQ | DTRGQKS (SEQ | DTMGQKS (SEQ | DTKGQKS (SEQ | DTLGQKS (SEQ |
| ID NO: 566) | ID NO: 700) | ID NO: 841) | ID NO: 978) | ID NO: 1114) | ID NO: 1253) | ID NO: 1395) |
| DTSGQRS (SEQ | DTFGQRS (SEQ | DTYGQRS (SEQ | DTRGQRS (SEQ | DTMGQRS (SEQ | DTKGQRS (SEQ | DTLGQRS (SEQ |
| ID NO: 567) | ID NO: 701) | ID NO: 842) | ID NO: 979) | ID NO: 1115) | ID NO: 1254) | ID NO: 1396) |
| DTSGQHS (SEQ | DTFGQHS (SEQ | DTYGQHS (SEQ | DTRGQHS (SEQ | DTMGQHS (SEQ | DTKGQHS (SEQ | DTLGQHS (SEQ |
| ID NO: 568) | ID NO: 702) | ID NO: 843) | ID NO: 980) | ID NO: 1116) | ID NO: 1255) | ID NO: 1397) |
| DTSGQPS (SEQ | DTFGQPS (SEQ | DTYGQPS (SEQ | DTRGQPS (SEQ | DTMGQPS (SEQ | DTKGQPS (SEQ | DTLGQPS (SEQ |
| ID NO: 569) | ID NO: 703) | ID NO: 844) | ID NO: 981) | ID NO: 1117) | ID NO: 1256) | ID NO: 1398) |
| DTSGQTS (SEQ | DTFGQTS (SEQ | DTYGQTS (SEQ | DTRGQTS (SEQ | DTMGQTS (SEQ | DTKGQTS (SEQ | DTLGQTS (SEQ |
| ID NO: 570) | ID NO: 704) | ID NO: 845) | ID NO: 982) | ID NO: 1118) | ID NO: 1257) | ID NO: 1399) |
| DTSGQDS (SEQ | DTFGQDS (SEQ | DTYGQDS (SEQ | DTRGQDS (SEQ | DTMGQDS (SEQ | DTKGQDS (SEQ | DTLGQDS (SEQ |
| ID NO: 571) | ID NO: 705) | ID NO: 846) | ID NO: 983) | ID NO: 1119) | ID NO: 1258) | ID NO: 1400) |
| DTSRLAS (SEQ | DTFRLAS (SEQ | DTYRLAS (SEQ | DTRRLAS (SEQ | DTMRLAS (SEQ | DTKRLAS (SEQ | DTLRLAS (SEQ |
| ID NO: 123) | ID NO: 706) | ID NO: 847) | ID NO: 984) | ID NO: 32) | ID NO: 1259) | ID NO: 1401) |
| DTSRLSS (SEQ | DTFRLSS (SEQ | DTYRLSS (SEQ | DTRRLSS (SEQ | DTMRLSS (SEQ | DTKRLSS (SEQ | DTLRLSS (SEQ |
| ID NO: 572) | ID NO: 707) | ID NO: 848) | ID NO: 985) | ID NO: 1120) | ID NO: 1260) | ID NO: 1402) |
| DTSRLKS (SEQ | DTFRLKS (SEQ | DTYRLKS (SEQ | DTRRLKS (SEQ | DTMRLKS (SEQ | DTKRLKS (SEQ | DTLRLKS (SEQ |
| ID NO: 573) | ID NO: 708) | ID NO: 849) | ID NO: 986) | ID NO: 1121) | ID NO: 1261) | ID NO: 1403) |
| DTSRLRS (SEQ | DTFRLRS (SEQ | DTYRLRS (SEQ | DTRRLRS (SEQ | DTMRLRS (SEQ | DTKRLRS (SEQ | DTLRLRS (SEQ |
| ID NO: 574) | ID NO: 709) | ID NO: 850) | ID NO: 987) | ID NO: 1122) | ID NO: 1262) | ID NO: 1404) |
| DTSRLHS (SEQ | DTFRLHS (SEQ | DTYRLHS (SEQ | DTRRLHS (SEQ | DTMRLHS (SEQ | DTKRLHS (SEQ | DTLRLHS (SEQ |
| ID NO: 575) | ID NO: 710) | ID NO: 851) | ID NO: 988) | ID NO: 1123) | ID NO: 1263) | ID NO: 1405) |
| DTSRLPS (SEQ | DTFRLPS (SEQ | DTYRLPS (SEQ | DTRRLPS (SEQ | DTMRLPS (SEQ | DTKRLPS (SEQ | DTLRLPS (SEQ |
| ID NO: 576) | ID NO: 711) | ID NO: 852) | ID NO: 989) | ID NO: 1124) | ID NO: 1264) | ID NO: 1406) |
| DTSRLTS (SEQ | DTFRLTS (SEQ | DTYRLTS (SEQ | DTRRLTS (SEQ | DTMRLTS (SEQ | DTKRLTS (SEQ | DTLRLTS (SEQ |
| ID NO: 577) | ID NO: 712) | ID NO: 853) | ID NO: 990) | ID NO: 1125) | ID NO: 1265) | ID NO: 1407) |
| DTSRLDS (SEQ | DTFRLDS (SEQ | DTYRLDS (SEQ | DTRRLDS (SEQ | DTMRLDS (SEQ | DTKRLDS (SEQ | DTLRLDS (SEQ |
| ID NO: 578) | ID NO: 713) | ID NO: 854) | ID NO: 991) | ID NO: 1126) | ID NO: 1266) | ID NO: 1408) |
| DTSRHAS (SEQ | DTFRHAS (SEQ | DTYRHAS (SEQ | DTRRHAS (SEQ | DTMRHAS (SEQ | DTKRHAS (SEQ | DTLRHAS (SEQ |
| ID NO: 579) | ID NO: 714) | ID NO: 855) | ID NO: 992) | ID NO: 1127) | ID NO: 1267) | ID NO: 1409) |
| DTSRHSS (SEQ | DTFRHSS (SEQ | DTYRHSS (SEQ | DTRRHSS (SEQ | DTMRHSS (SEQ | DTKRHSS (SEQ | DTLRHSS (SEQ |
| ID NO: 580) | ID NO: 715) | ID NO: 856) | ID NO: 993) | ID NO: 1128) | ID NO: 1268) | ID NO: 1410) |
| DTSRHKS (SEQ | DTFRHKS (SEQ | DTYRHKS (SEQ | DTRRHKS (SEQ | DTMRHKS (SEQ | DTKRHKS (SEQ | DTLRHKS (SEQ |
| ID NO: 581) | ID NO: 716) | ID NO: 857) | ID NO: 994) | ID NO: 1129) | ID NO: 1269) | ID NO: 1411) |
| DTSRHRS (SEQ | DTFRHRS (SEQ | DTYRHRS (SEQ | DTRRHRS (SEQ | DTMRHRS (SEQ | DTKRHRS (SEQ | DTLRHRS (SEQ |
| ID NO: 582) | ID NO: 717) | ID NO: 858) | ID NO: 995) | ID NO: 1130) | ID NO: 1270) | ID NO: 1412) |
| DTSRHHS (SEQ | DTFRHHS (SEQ | DTYRHHS (SEQ | DTRRHHS (SEQ | DTMRHHS (SEQ | DTKRHHS (SEQ | DTLRHHS (SEQ |
| ID NO: 583) | ID NO: 718) | ID NO: 859) | ID NO: 996) | ID NO: 1131) | ID NO: 1271) | ID NO: 1413) |
| DTSRHPS (SEQ | DTFRHPS (SEQ | DTYRHPS (SEQ | DTRRHPS (SEQ | DTMRHPS (SEQ | DTKRHPS (SEQ | DTLRHPS (SEQ |
| ID NO: 584) | ID NO: 719) | ID NO: 860) | ID NO: 997) | ID NO: 1132) | ID NO: 1272) | ID NO: 1414) |
| DTSRHTS (SEQ | DTFRHTS (SEQ | DTYRHTS (SEQ | DTRRHTS (SEQ | DTMRHTS (SEQ | DTKRHTS (SEQ | DTLRHTS (SEQ |
| ID NO: 585) | ID NO: 720) | ID NO: 861) | ID NO: 998) | ID NO: 1133) | ID NO: 1273) | ID NO: 1415) |
| DTSRHDS (SEQ | DTFRHDS (SEQ | DTYRHDS (SEQ | DTRRHDS (SEQ | DTMRHDS (SEQ | DTKRHDS (SEQ | DTLRHDS (SEQ |
| ID NO: 586) | ID NO: 721) | ID NO: 862) | ID NO: 999) | ID NO: 1134) | ID NO: 1274) | ID NO: 1416) |
| DTSRQAS (SEQ | DTFRQAS (SEQ | DTYRQAS (SEQ | DTRRQAS (SEQ | DTMRQAS (SEQ | DTKRQAS (SEQ | DTLRQAS (SEQ |
| ID NO: 587) | ID NO: 722) | ID NO: 863) | ID NO: 1000) | ID NO: 1135) | ID NO: 1275) | ID NO: 1417) |
| DTSRQSS (SEQ | DTFRQSS (SEQ | DTYRQSS (SEQ | DTRRQSS (SEQ | DTMRQSS (SEQ | DTKRQSS (SEQ | DTLRQSS (SEQ |
| ID NO: 588) | ID NO: 723) | ID NO: 864) | ID NO: 1001) | ID NO: 1136) | ID NO: 1276) | ID NO: 1418) |
| DTSRQKS (SEQ | DTFRQKS (SEQ | DTYRQKS (SEQ | DTRRQKS (SEQ | DTMRQKS (SEQ | DTKRQKS (SEQ | DTLRQKS (SEQ |
| ID NO: 589) | ID NO: 724) | ID NO: 865) | ID NO: 1002) | ID NO: 1137) | ID NO: 1277) | ID NO: 1419) |
| DTSRQRS (SEQ | DTFRQRS (SEQ | DTYRQRS (SEQ | DTRRQRS (SEQ | DTMRQRS (SEQ | DTKRQRS (SEQ | DTLRQRS (SEQ |
| ID NO: 590) | ID NO: 725) | ID NO: 866) | ID NO: 1003) | ID NO: 1138) | ID NO: 1278) | ID NO: 1420) |
| DTSRQHS (SEQ | DTFRQHS (SEQ | DTYRQHS (SEQ | DTRRQHS (SEQ | DTMRQHS (SEQ | DTKRQHS (SEQ | DTLRQHS (SEQ |
| ID NO: 591) | ID NO: 726) | ID NO: 867) | ID NO: 1004) | ID NO: 1139) | ID NO: 1279) | ID NO: 1421) |
| DTSRQPS (SEQ | DTFRQPS (SEQ | DTYRQPS (SEQ | DTRRQPS (SEQ | DTMRQPS (SEQ | DTKRQPS (SEQ | DTLRQPS (SEQ |
| ID NO: 592) | ID NO: 727) | ID NO: 868) | ID NO: 1005) | ID NO: 1140) | ID NO: 1280) | ID NO: 1422) |
| DTSRQTS (SEQ | DTFRQTS (SEQ | DTYRQTS (SEQ | DTRRQTS (SEQ | DTMRQTS (SEQ | DTKRQTS (SEQ | DTLRQTS (SEQ |
| ID NO: 593) | ID NO: 728) | ID NO: 869) | ID NO: 1006) | ID NO: 1141) | ID NO: 1281) | ID NO: 1423) |
| DTSRQDS (SEQ | DTFRQDS (SEQ | DTYRQDS (SEQ | DTRRQDS (SEQ | DTMRQDS (SEQ | DTKRQDS (SEQ | DTLRQDS (SEQ |
| ID NO: 594) | ID NO: 729) | ID NO: 870) | ID NO: 1007) | ID NO: 1142) | ID NO: 1282) | ID NO: 1424) |
| DTSYLAS (SEQ | DTFYLAS (SEQ | DTYYLAS (SEQ | DTRYLAS (SEQ | DTMYLAS (SEQ | DTKYLAS (SEQ | DTLYLAS (SEQ |
| ID | ID NO: 99) | ID NO: 871) | ID NO: 178) | ID NO: 158) | ID NO: 1283) | ID NO: 1425) |
| NOS: 81&143) | | | | | | |
| DTSYLSS (SEQ | DTFYLSS (SEQ | DTYYLSS (SEQ | DTRYLSS (SEQ | DTMYLSS (SEQ | DTKYLSS (SEQ | DTLYLSS (SEQ |
| ID | ID NO: 90) | ID NO: 872) | ID NO: 59) | ID NO: 160) | ID NO: 1284) | ID NO: 1426) |
| NOS: 85&145) | | | | | | |
| DTSYLKS (SEQ | DTFYLKS (SEQ | DTYYLKS (SEQ | DTRYLKS (SEQ | DTMYLKS (SEQ | DTKYLKS (SEQ | DTLYLKS (SEQ |
| ID NO: 595) | ID NO: 730) | ID NO: 873) | ID NO: 1008) | ID NO: 1143) | ID NO: 1285) | ID NO: 1427) |
| DTSYLRS (SEQ | DTFYLRS (SEQ | DTYYLRS (SEQ | DTRYLRS (SEQ | DTMYLRS (SEQ | DTKYLRS (SEQ | DTLYLRS (SEQ |
| ID NO: 596) | ID NO: 731) | ID NO: 874) | ID NO: 1009) | ID NO: 1144) | ID NO: 1286) | ID NO: 1428) |
| DTSYLHS (SEQ | DTFYLHS (SEQ | DTYYLHS (SEQ | DTRYLHS (SEQ | DTMYLHS (SEQ | DTKYLHS (SEQ | DTLYLHS (SEQ |
| ID NO: 597) | ID NO: 732) | ID NO: 875) | ID NO: 1010) | ID NO: 1145) | ID NO: 1287) | ID NO: 1429) |
| DTSYLPS (SEQ | DTFYLPS (SEQ | DTYYLPS (SEQ | DTRYLPS (SEQ | DTMYLPS (SEQ | DTKYLPS (SEQ | DTLYLPS (SEQ |
| ID NO: 598) | ID NO: 733) | ID NO: 876) | ID NO: 1011) | ID NO: 1146) | ID NO: 1288) | ID NO: 1430) |
| DTSYLTS (SEQ | DTFYLTS (SEQ | DTYYLTS (SEQ | DTRYLTS (SEQ | DTMYLTS (SEQ | DTKYLTS (SEQ | DTLYLTS (SEQ |
| ID NO: 599) | ID NO: 734) | ID NO: 877) | ID NO: 1012) | ID NO: 1147) | ID NO: 1289) | ID NO: 1431) |
| DTSYLDS (SEQ | DTFYLDS (SEQ | DTYYLDS (SEQ | DTRYLDS (SEQ | DTMYLDS (SEQ | DTKYLDS (SEQ | DTLYLDS (SEQ |
| ID NO: 600) | ID NO: 735) | ID NO: 878) | ID NO: 1013) | ID NO: 1148) | ID NO: 1290) | ID NO: 1432) |
| DTSYHAS (SEQ | DTFYHAS (SEQ | DTYYHAS (SEQ | DTRYHAS (SEQ | DTMYHAS (SEQ | DTKYHAS (SEQ | DTLYHAS (SEQ |
| ID NO: 601) | ID NO: 736) | ID NO: 879) | ID NO: 1014) | ID NO: 1149) | ID NO: 1291) | ID NO: 1433) |
| DTSYHSS (SEQ | DTFYHSS (SEQ | DTYYHSS (SEQ | DTRYHSS (SEQ | DTMYHSS (SEQ | DTKYHSS (SEQ | DTLYHSS (SEQ |
| ID NO: 602) | ID NO: 737) | ID NO: 880) | ID NO: 1015) | ID NO: 1150) | ID NO: 1292) | ID NO: 1434) |
| DTSYHKS (SEQ | DTFYHKS (SEQ | DTYYHKS (SEQ | DTRYHKS (SEQ | DTMYHKS (SEQ | DTKYHKS (SEQ | DTLYHKS (SEQ |
| ID NO: 603) | ID NO: 738) | ID NO: 881) | ID NO: 1016) | ID NO: 1151) | ID NO: 1293) | ID NO: 1435) |
| DTSYHRS (SEQ | DTFYHRS (SEQ | DTYYHRS (SEQ | DTRYHRS (SEQ | DTMYHRS (SEQ | DTKYHRS (SEQ | DTLYHRS (SEQ |
| ID NO: 604) | ID NO: 739) | ID NO: 882) | ID NO: 1017) | ID NO: 1152) | ID NO: 1294) | ID NO: 1436) |
| DTSYHHS (SEQ | DTFYHHS (SEQ | DTYYHHS (SEQ | DTRYHHS (SEQ | DTMYHHS (SEQ | DTKYHHS (SEQ | DTLYHHS (SEQ |
| ID NO: 605) | ID NO: 740) | ID NO: 883) | ID NO: 1018) | ID NO: 1153) | ID NO: 1295) | ID NO: 1437) |
| DTSYHPS (SEQ | DTFYHPS (SEQ | DTYYHPS (SEQ | DTRYHPS (SEQ | DTMYHPS (SEQ | DTKYHPS (SEQ | DTLYHPS (SEQ |
| ID NO: 606) | ID NO: 741) | ID NO: 884) | ID NO: 1019) | ID NO: 1154) | ID NO: 1296) | ID NO: 1438) |
| DTSYHTS (SEQ | DTFYHTS (SEQ | DTYYHTS (SEQ | DTRYHTS (SEQ | DTMYHTS (SEQ | DTKYHTS (SEQ | DTLYHTS (SEQ |
| ID NO: 607) | ID NO: 742) | ID NO: 885) | ID NO: 1020) | ID NO: 1155) | ID NO: 1297) | ID NO: 1439) |
| DTSYHDS (SEQ | DTFYHDS (SEQ | DTYYHDS (SEQ | DTRYHDS (SEQ | DTMYHDS (SEQ | DTKYHDS (SEQ | DTLYHDS (SEQ |
| ID NO: 608) | ID NO: 743) | ID NO: 886) | ID NO: 1021) | ID NO: 1156) | ID NO: 1298) | ID NO: 1440) |
| DTSYQAS (SEQ | DTFYQAS (SEQ | DTYYQAS (SEQ | DTRYQAS (SEQ | DTMYQAS (SEQ | DTKYQAS (SEQ | DTLYQAS (SEQ |
| ID NO: 147) | ID NO: 744) | ID NO: 887) | ID NO: 167) | ID NO: 151) | ID NO: 1299) | ID NO: 1441) |
| DTSYQSS (SEQ | DTFYQSS (SEQ | DTYYQSS (SEQ | DTRYQSS (SEQ | DTMYQSS (SEQ | DTKYQSS (SEQ | DTLYQSS (SEQ |
| ID NO: 149) | ID NO: 745) | ID NO: 888) | ID NO: 53) | ID NO: 43) | ID NO: 1300) | ID NO: 1442) |
| DTSYQKS (SEQ | DTFYQKS (SEQ | DTYYQKS (SEQ | DTRYQKS (SEQ | DTMYQKS (SEQ | DTKYQKS (SEQ | DTLYQKS (SEQ |
| ID NO: 609) | ID NO: 746) | ID NO: 889) | ID NO: 1022) | ID NO: 1157) | ID NO: 1301) | ID NO: 1443) |
| DTSYQRS (SEQ | DTFYQRS (SEQ | DTYYQRS (SEQ | DTRYQRS (SEQ | DTMYQRS (SEQ | DTKYQRS (SEQ | DTLYQRS (SEQ |
| ID NO: 610) | ID NO: 747) | ID NO: 890) | ID NO: 1023) | ID NO: 1158) | ID NO: 1302) | ID NO: 1444) |
| DTSYQHS (SEQ | DTFYQHS (SEQ | DTYYQHS (SEQ | DTRYQHS (SEQ | DTMYQHS (SEQ | DTKYQHS (SEQ | DTLYQHS (SEQ |
| ID NO: 611) | ID NO: 748) | ID NO: 891) | ID NO: 1024) | ID NO: 1159) | ID NO: 1303) | ID NO: 1445) |
| DTSYQPS (SEQ | DTFYQPS (SEQ | DTYYQPS (SEQ | DTRYQPS (SEQ | DTMYQPS (SEQ | DTKYQPS (SEQ | DTLYQPS (SEQ |
| ID NO: 612) | ID NO: 749) | ID NO: 892) | ID NO: 1025) | ID NO: 1160) | ID NO: 1304) | ID NO: 1446) |
| DTSYQTS (SEQ | DTFYQTS (SEQ | DTYYQTS (SEQ | DTRYQTS (SEQ | DTMYQTS (SEQ | DTKYQTS (SEQ | DTLYQTS (SEQ |
| ID NO: 613) | ID NO: 750) | ID NO: 893) | ID NO: 1026) | ID NO: 1161) | ID NO: 1305) | ID NO: 1447) |
| DTSYQDS (SEQ | DTFYQDS (SEQ | DTYYQDS (SEQ | DTRYQDS (SEQ | DTMYQDS (SEQ | DTKYQDS (SEQ | DTLYQDS (SEQ |
| ID NO: 614) | ID NO: 751) | ID NO: 894) | ID NO: 1027) | ID NO: 1162) | ID NO: 1306) | ID NO: 1448) |
| DTSFLAS (SEQ | DTFFLAS (SEQ | DTYFLAS (SEQ | DTRFLAS (SEQ | DTMFLAS (SEQ | DTKFLAS (SEQ | DTLFLAS (SEQ |
| ID NO: 615) | ID NO: 752) | ID NO: 895) | ID NO: 1028) | ID NO: 1163) | ID NO: 1307) | ID NO: 1449) |
| DTSFLSS (SEQ | DTFFLSS (SEQ | DTYFLSS (SEQ | DTRFLSS (SEQ | DTMFLSS (SEQ | DTKFLSS (SEQ | DTLFLSS (SEQ |
| ID NO: 616) | ID NO: 753) | ID NO: 896) | ID NO: 1029) | ID NO: 1164) | ID NO: 1308) | ID NO: 1450) |
| DTSFLKS (SEQ | DTFFLKS (SEQ | DTYFLKS (SEQ | DTRFLKS (SEQ | DTMFLKS (SEQ | DTKFLKS (SEQ | DTLFLKS (SEQ |
| ID NO: 617) | ID NO: 754) | ID NO: 897) | ID NO: 1030) | ID NO: 1165) | ID NO: 1309) | ID NO: 1451) |
| DTSFLRS (SEQ | DTFFLRS (SEQ | DTYFLRS (SEQ | DTRFLRS (SEQ | DTMFLRS (SEQ | DTKFLRS (SEQ | DTLFLRS (SEQ |
| ID NO: 618) | ID NO: 755) | ID NO: 898) | ID NO: 1031) | ID NO: 1166) | ID NO: 1310) | ID NO: 1452) |
| DTSFLHS (SEQ | DTFFLHS (SEQ | DTYFLHS (SEQ | DTRFLHS (SEQ | DTMFLHS (SEQ | DTKFLHS (SEQ | DTLFLHS (SEQ |
| ID NO: 619) | ID NO: 756) | ID NO: 899) | ID NO: 1032) | ID NO: 1167) | ID NO: 1311) | ID NO: 1453) |
| DTSFLPS (SEQ | DTFFLPS (SEQ | DTYFLPS (SEQ | DTRFLPS (SEQ | DTMFLPS (SEQ | DTKFLPS (SEQ | DTLFLPS (SEQ |
| ID NO: 620) | ID NO: 757) | ID NO: 900) | ID NO: 1033) | ID NO: 1168) | ID NO: 1312) | ID NO: 1454) |
| DTSFLTS (SEQ | DTFFLTS (SEQ | DTYFLTS (SEQ | DTRFLTS (SEQ | DTMFLTS (SEQ | DTKFLTS (SEQ | DTLFLTS (SEQ |
| ID NO: 621) | ID NO: 758) | ID NO: 901) | ID NO: 1034) | ID NO: 1169) | ID NO: 1313) | ID NO: 1455) |
| DTSFLDS (SEQ | DTFFLDS (SEQ | DTYFLDS (SEQ | DTRFLDS (SEQ | DTMFLDS (SEQ | DTKFLDS (SEQ | DTLFLDS (SEQ |
| ID NO: 77) | ID NO: 50) | ID NO: 902) | ID NO: 1035) | ID NO: 1170) | ID NO: 1314) | ID NO: 1456) |
| DTSFHAS (SEQ | DTFFHAS (SEQ | DTYFHAS (SEQ | DTRFHAS (SEQ | DTMFHAS (SEQ | DTKFHAS (SEQ | DTLFHAS (SEQ |
| ID NO: 622) | ID NO: 759) | ID NO: 903) | ID NO: 1036) | ID NO: 1171) | ID NO: 1315) | ID NO: 1457) |
| DTSFHSS (SEQ | DTFFHSS (SEQ | DTYFHSS (SEQ | DTRFHSS (SEQ | DTMFHSS (SEQ | DTKFHSS (SEQ | DTLFHSS (SEQ |
| ID NO: 623) | ID NO: 760) | ID NO: 904) | ID NO: 1037) | ID NO: 1172) | ID NO: 1316) | ID NO: 1458) |
| DTSFHKS (SEQ | DTFFHKS (SEQ | DTYFHKS (SEQ | DTRFHKS (SEQ | DTMFHKS (SEQ | DTKFHKS (SEQ | DTLFHKS (SEQ |
| ID NO: 624) | ID NO: 761) | ID NO: 905) | ID NO: 1038) | ID NO: 1173) | ID NO: 1317) | ID NO: 1459) |
| DTSFHRS (SEQ | DTFFHRS (SEQ | DTYFHRS (SEQ | DTRFHRS (SEQ | DTMFHRS (SEQ | DTKFHRS (SEQ | DTLFHRS (SEQ |
| ID NO: 625) | ID NO: 762) | ID NO: 906) | ID NO: 1039) | ID NO: 1174) | ID NO: 1318) | ID NO: 1460) |
| DTSFHHS (SEQ | DTFFHHS (SEQ | DTYFHHS (SEQ | DTRFHHS (SEQ | DTMFHHS (SEQ | DTKFHHS (SEQ | DTLFHHS (SEQ |
| ID NO: 626) | ID NO: 763) | ID NO: 907) | ID NO: 1040) | ID NO: 1175) | ID NO: 1319) | ID NO: 1461) |
| DTSFHPS (SEQ | DTFFHPS (SEQ | DTYFHPS (SEQ | DTRFHPS (SEQ | DTMFHPS (SEQ | DTKFHPS (SEQ | DTLFHPS (SEQ |
| ID NO: 627) | ID NO: 764) | ID NO: 908) | ID NO: 1041) | ID NO: 1176) | ID NO: 1320) | ID NO: 1462) |
| DTSFHTS (SEQ | DTFFHTS (SEQ | DTYFHTS (SEQ | DTRFHTS (SEQ | DTMFHTS (SEQ | DTKFHTS (SEQ | DTLFHTS (SEQ |
| ID NO: 628) | ID NO: 765) | ID NO: 909) | ID NO: 1042) | ID NO: 1177) | ID NO: 1321) | ID NO: 1463) |
| DTSFHDS (SEQ | DTFFHDS (SEQ | DTYFHDS (SEQ | DTRFHDS (SEQ | DTMFHDS (SEQ | DTKFHDS (SEQ | DTLFHDS (SEQ |
| ID NO: 629) | ID NO: 766) | ID NO: 910) | ID NO: 1043) | ID NO: 1178) | ID NO: 1322) | ID NO: 1464) |
| DTSFQAS (SEQ | DTFFQAS (SEQ | DTYFQAS (SEQ | DTRFQAS (SEQ | DTMFQAS (SEQ | DTKFQAS (SEQ | DTLFQAS (SEQ |
| ID NO: 630) | ID NO: 767) | ID NO: 911) | ID NO: 1044) | ID NO: 1179) | ID NO: 1323) | ID NO: 1465) |
| DTSFQSS (SEQ | DTFFQSS (SEQ | DTYFQSS (SEQ | DTRFQSS (SEQ | DTMFQSS (SEQ | DTKFQSS (SEQ | DTLFQSS (SEQ |
| ID NO: 631) | ID NO: 768) | ID NO: 912) | ID NO: 1045) | ID NO: 1180) | ID NO: 1324) | ID NO: 1466) |
| DTSFQKS (SEQ | DTFFQKS (SEQ | DTYFQKS (SEQ | DTRFQKS (SEQ | DTMFQKS (SEQ | DTKFQKS (SEQ | DTLFQKS (SEQ |
| ID NO: 632) | ID NO: 769) | ID NO: 913) | ID NO: 1046) | ID NO: 1181) | ID NO: 1325) | ID NO: 1467) |
| DTSFQRS (SEQ | DTFFQRS (SEQ | DTYFQRS (SEQ | DTRFQRS (SEQ | DTMFQRS (SEQ | DTKFQRS (SEQ | DTLFQRS (SEQ |
| ID NO: 633) | ID NO: 770) | ID NO: 914) | ID NO: 1047) | ID NO: 1182) | ID NO: 1326) | ID NO: 1468) |
| DTSFQHS (SEQ | DTFFQHS (SEQ | DTYFQHS (SEQ | DTRFQHS (SEQ | DTMFQHS (SEQ | DTKFQHS (SEQ | DTLFQHS (SEQ |
| ID NO: 634) | ID NO: 771) | ID NO: 915) | ID NO: 1048) | ID NO: 1183) | ID NO: 1327) | ID NO: 1469) |
| DTSFQPS (SEQ | DTFFQPS (SEQ | DTYFQPS (SEQ | DTRFQPS (SEQ | DTMFQPS (SEQ | DTKFQPS (SEQ | DTLFQPS (SEQ |
| ID NO: 635) | ID NO: 772) | ID NO: 916) | ID NO: 1049) | ID NO: 1184) | ID NO: 1328) | ID NO: 1470) |
| DTSFQTS (SEQ | DTFFQTS (SEQ | DTYFQTS (SEQ | DTRFQTS (SEQ | DTMFQTS (SEQ | DTKFQTS (SEQ | DTLFQTS (SEQ |
| ID NO: 636) | ID NO: 773) | ID NO: 917) | ID NO: 1050) | ID NO: 1185) | ID NO: 1329) | ID NO: 1471) |
| DTSFQDS (SEQ | DTFFQDS (SEQ | DTYFQDS (SEQ | DTRFQDS (SEQ | DTMFQDS (SEQ | DTKFQDS (SEQ | DTLFQDS (SEQ |
| ID NO: 637) | ID NO: 774) | ID NO: 918) | ID NO: 1051) | ID NO: 1186) | ID NO: 1330) | ID NO: 1472) |
| DTSLLAS (SEQ | DTFLLAS (SEQ | DTYLLAS (SEQ | DTRLLAS (SEQ | DTMLLAS (SEQ | DTKLLAS (SEQ | DTLLLAS (SEQ |
| ID NO: 124) | ID NO: 775) | ID NO: 919) | ID NO: 1052) | ID NO: 1187) | ID NO: 1331) | ID NO: 133) |
| DTSLLSS (SEQ | DTFLLSS (SEQ | DTYLLSS (SEQ | DTRLLSS (SEQ | DTMLLSS (SEQ | DTKLLSS (SEQ | DTLLLSS (SEQ |
| ID NO: 638) | ID NO: 776) | ID NO: 920) | ID NO: 1053) | ID NO: 1188) | ID NO: 1332) | ID NO: 1473) |
| DTSLLKS (SEQ | DTFLLKS (SEQ | DTYLLKS (SEQ | DTRLLKS (SEQ | DTMLLKS (SEQ | DTKLLKS (SEQ | DTLLLKS (SEQ |
| ID NO: 639) | ID NO: 777) | ID NO: 921) | ID NO: 1054) | ID NO: 1189) | ID NO: 1333) | ID NO: 1474) |
| DTSLLRS (SEQ | DTFLLRS (SEQ | DTYLLRS (SEQ | DTRLLRS (SEQ | DTMLLRS (SEQ | DTKLLRS (SEQ | DTLLLRS (SEQ |
| ID NO: 640) | ID NO: 778) | ID NO: 922) | ID NO: 1055) | ID NO: 1190) | ID NO: 1334) | ID NO: 1475) |
| DTSLLHS (SEQ | DTFLLHS (SEQ | DTYLLHS (SEQ | DTRLLHS (SEQ | DTMLLHS (SEQ | DTKLLHS (SEQ | DTLLLHS (SEQ |
| ID NO: 641) | ID NO: 779) | ID NO: 923) | ID NO: 1056) | ID NO: 1191) | ID NO: 1335) | ID NO: 1476) |
| DTSLLPS (SEQ | DTFLLPS (SEQ | DTYLLPS (SEQ | DTRLLPS (SEQ | DTMLLPS (SEQ | DTKLLPS (SEQ | DTLLLPS (SEQ |
| ID NO: 642) | ID NO: 780) | ID NO: 924) | ID NO: 1057) | ID NO: 1192) | ID NO: 1336) | ID NO: 1477) |
| DTSLLTS (SEQ | DTFLLTS (SEQ | DTYLLTS (SEQ | DTRLLTS (SEQ | DTMLLTS (SEQ | DTKLLTS (SEQ | DTLLLTS (SEQ |
| ID NO: 643) | ID NO: 781) | ID NO: 925) | ID NO: 1058) | ID NO: 1193) | ID NO: 1337) | ID NO: 1478) |
| DTSLLDS (SEQ | DTFLLDS (SEQ | DTYLLDS (SEQ | DTRLLDS (SEQ | DTMLLDS (SEQ | DTKLLDS (SEQ | DTLLLDS (SEQ |
| ID NO: 126) | ID NO: 782) | ID NO: 926) | ID NO: 1059) | ID NO: 1194) | ID NO: 1338) | ID NO: 75) |
| DTSLHAS (SEQ | DTFLHAS (SEQ | DTYLHAS (SEQ | DTRLHAS (SEQ | DTMLHAS (SEQ | DTKLHAS (SEQ | DTLLHAS (SEQ |
| ID NO: 644) | ID NO: 783) | ID NO: 927) | ID NO: 1060) | ID NO: 1195) | ID NO: 1339) | ID NO: 1479) |
| DTSLHSS (SEQ | DTFLHSS (SEQ | DTYLHSS (SEQ | DTRLHSS (SEQ | DTMLHSS (SEQ | DTKLHSS (SEQ | DTLLHSS (SEQ |
| ID NO: 645) | ID NO: 784) | ID NO: 928) | ID NO: 1061) | ID NO: 1196) | ID NO: 1340) | ID NO: 1480) |
| DTSLHKS (SEQ | DTFLHKS (SEQ | DTYLHKS (SEQ | DTRLHKS (SEQ | DTMLHKS (SEQ | DTKLHKS (SEQ | DTLLHKS (SEQ |
| ID NO: 646) | ID NO: 785) | ID NO: 929) | ID NO: 1062) | ID NO: 1197) | ID NO: 1341) | ID NO: 1481) |
| DTSLHRS (SEQ | DTFLHRS (SEQ | DTYLHRS (SEQ | DTRLHRS (SEQ | DTMLHRS (SEQ | DTKLHRS (SEQ | DTLLHRS (SEQ |
| ID NO: 647) | ID NO: 786) | ID NO: 930) | ID NO: 1063) | ID NO: 1198) | ID NO: 1342) | ID NO: 1482) |
| DTSLHHS (SEQ | DTFLHHS (SEQ | DTYLHHS (SEQ | DTRLHHS (SEQ | DTMLHHS (SEQ | DTKLHHS (SEQ | DTLLHHS (SEQ |
| ID NO: 648) | ID NO: 787) | ID NO: 931) | ID NO: 1064) | ID NO: 1199) | ID NO: 1343) | ID NO: 1483) |
| DTSLHPS (SEQ | DTFLHPS (SEQ | DTYLHPS (SEQ | DTRLHPS (SEQ | DTMLHPS (SEQ | DTKLHPS (SEQ | DTLLHPS (SEQ |
| ID NO: 649) | ID NO: 788) | ID NO: 932) | ID NO: 1065) | ID NO: 1200) | ID NO: 1344) | ID NO: 1484) |
| DTSLHTS (SEQ | DTFLHTS (SEQ | DTYLHTS (SEQ | DTRLHTS (SEQ | DTMLHTS (SEQ | DTKLHTS (SEQ | DTLLHTS (SEQ |
| ID NO: 650) | ID NO: 789) | ID NO: 933) | ID NO: 1066) | ID NO: 1201) | ID NO: 1345) | ID NO: 1485) |
| DTSLHDS (SEQ | DTFLHDS (SEQ | DTYLHDS (SEQ | DTRLHDS (SEQ | DTMLHDS (SEQ | DTKLHDS (SEQ | DTLLHDS (SEQ |
| ID NO: 651) | ID NO: 790) | ID NO: 934) | ID NO: 1067) | ID NO: 1202) | ID NO: 1346) | ID NO: 1486) |
| DTSLQAS (SEQ | DTFLQAS (SEQ | DTYLQAS (SEQ | DTRLQAS (SEQ | DTMLQAS (SEQ | DTKLQAS (SEQ | DTLLQAS (SEQ |
| ID NO: 652) | ID NO: 791) | ID NO: 935) | ID NO: 1068) | ID NO: 1203) | ID NO: 1347) | ID NO: 1487) |
| DTSLQSS (SEQ | DTFLQSS (SEQ | DTYLQSS (SEQ | DTRLQSS (SEQ | DTMLQSS (SEQ | DTKLQSS (SEQ | DTLLQSS (SEQ |
| ID NO: 653) | ID NO: 792) | ID NO: 936) | ID NO: 1069) | ID NO: 1204) | ID NO: 1348) | ID NO: 1488) |
| DTSLQKS (SEQ | DTFLQKS (SEQ | DTYLQKS (SEQ | DTRLQKS (SEQ | DTMLQKS (SEQ | DTKLQKS (SEQ | DTLLQKS (SEQ |
| ID NO: 654) | ID NO: 793) | ID NO: 937) | ID NO: 1070) | ID NO: 1205) | ID NO: 1349) | ID NO: 1489) |
| DTSLQRS (SEQ | DTFLQRS (SEQ | DTYLQRS (SEQ | DTRLQRS (SEQ | DTMLQRS (SEQ | DTKLQRS (SEQ | DTLLQRS (SEQ |
| ID NO: 655) | ID NO: 794) | ID NO: 938) | ID NO: 1071) | ID NO: 1206) | ID NO: 1350) | ID NO: 1490) |
| DTSLQHS (SEQ | DTFLQHS (SEQ | DTYLQHS (SEQ | DTRLQHS (SEQ | DTMLQHS (SEQ | DTKLQHS (SEQ | DTLLQHS (SEQ |
| ID NO: 656) | ID NO: 795) | ID NO: 939) | ID NO: 1072) | ID NO: 1207) | ID NO: 1351) | ID NO: 1491) |
| DTSLQPS (SEQ | DTFLQPS (SEQ | DTYLQPS (SEQ | DTRLQPS (SEQ | DTMLQPS (SEQ | DTKLQPS (SEQ | DTLLQPS (SEQ |
| ID NO: 657) | ID NO: 796) | ID NO: 940) | ID NO: 1073) | ID NO: 1208) | ID NO: 1352) | ID NO: 1492) |
| DTSLQTS (SEQ | DTFLQTS (SEQ | DTYLQTS (SEQ | DTRLQTS (SEQ | DTMLQTS (SEQ | DTKLQTS (SEQ | DTLLQTS (SEQ |
| ID NO: 658) | ID NO: 797) | ID NO: 941) | ID NO: 1074) | ID NO: 1209) | ID NO: 1353) | ID NO: 1493) |
| DTSLQDS (SEQ | DTFLQDS (SEQ | DTYLQDS (SEQ | DTRLQDS (SEQ | DTMLQDS (SEQ | DTKLQDS (SEQ | DTLLQDS (SEQ |
| ID NO: 659) | ID NO: 798) | ID NO: 942) | ID NO: 1075) | ID NO: 1210) | ID NO: 1354) | ID NO: 1494) |

Bold faced & underlined amino acid residues are the residues which differ from the amino acid sequence in palivizumab

[0195] TABLE 3F
VL CDR3 Sequences

FQGSGYPFT (SEQ ID NO: 6)
FQGSFYPFT (SEQ ID NO: 61)
FQGSYYPFT (SEQ ID NO: 1495)
FQGSWYPFT (SEQ ID NO: 1496)
Bold faced and underlined amino acid residues are the residues which differ from the amino acid sequence in palivizumab

[0196] In one embodiment, antibodies of the invention comprise a VH CDR1 having the amino acid sequence of SEQ ID NO:1, SEQ ID NO:10 or SEQ ID NO:18. In another embodiment, antibodies of the invention comprise a VH CDR2 having the amino acid sequence of SEQ ID NO:2, SEQ ID NO:19, SEQ ID NO:25, SEQ ID NO:37, SEQ ID NO:41, SEQ ID NO:45, SEQ ID NO:305, or SEQ ID NO:329. In another embodiment, antibodies of the invention comprise a VH CDR3 having the amino acid sequence of SEQ ID NO:3, SEQ ID NO:12, SEQ ID NO:20, SEQ ID NO:29, SEQ ID NO:79, or SEQ ID NO:311. In another embodiment, antibodies of the invention comprise a VH CDR1 having the amino acid sequence of SEQ ID NO:1, SEQ ID NO:10 or SEQ ID NO:18, a VH CDR2 having the amino acid sequence of SEQ ID NO:2, SEQ ID NO:19, SEQ ID NO:25, SEQ ID NO:37, SEQ ID NO:41, SEQ ID NO:45, SEQ ID NO:305, or SEQ ID NO:329, and a VH CDR3 having the amino acid sequence of SEQ ID NO:3, SEQ ID NO:12, SEQ ID NO:20, SEQ ID NO:29, SEQ ID NO:79, or SEQ ID NO:311. In a preferred embodiment, antibodies of the invention comprise a VH CDR1 having the amino acid sequence of SEQ ID NO:10, a VH CDR2 having the amino acid sequence of SEQ ID NO:19, and a VH CDR3 having the amino acid sequence of SEQ ID NO:20. In accordance with these embodiments, the antibodies immunospecifically bind to a RSV F antigen. In certain embodiments, the above-referenced antibodies comprise a modified IgG (e.g., IgG1) constant domain, or FcRn binding fragment thereof (e.g., the Fc domain or hinge-Fc domain), described herein, and preferably the modified IgG constant domain comprises the YTE modification (e.g., MEDI-524-YTE).

[0197] In one embodiment, the amino acid sequence of the VH domain of an antibody of the invention is:

Q V T L R E S G P A L V K P T
Q T L T L T C T F S G F S L S
T A G M S V G W I R Q P P G K
A L E W L A D I W W D D K K H
Y N P S L K D R L T I S K D T
S K N Q V V L K V T N M D P A
D T A T Y Y C A R D M I F N F
Y F D V W G Q* G T T V T V S S

(SEQ ID NO:48), wherein the three underlined regions indicate the VH CDR1, CDR2, and CDR3 regions, respectively; the four non-underlined regions correlate with the VH FR1, FR2, FR3, FR4, respectively; and the asterisk indicates the position of an A→Q mutation in VH FR4 as compared to the VH FR4 of palivizumab shown in FIG. 1B (SEQ ID NO:7). This VH domain (SEQ ID NO:48) is identical to that of the MEDI-524 (and MEDI-524-YTE) antibody described elsewhere herein and shown in FIG. 13A. In some embodiments, this VH FR can be used in combination with any of the VH CDRs identified in Table 1 and/or Tables 3A-C. In one embodiment, the MEDI-524 antibody comprises the VH domain of FIG. 13A (SEQ ID NO:48) and the C-gamma-1 (nG1m) constant domain described in Johnson et al. (1997), J. Infect. Dis. 176, 1215-1224 and U.S. Pat. No. 5,824,307. In certain embodiments, said antibody comprises a modified IgG, such as a modified IgG1, constant domain, or FcRn-binding fragment thereof. In one embodiment, an antibody of the invention comprises a VH chain having the amino acid sequence of SEQ ID NO:208 and/or a VH domain having the amino acid sequence of SEQ ID NO:7. In another embodiment, an antibody of the invention comprises a VH chain having the amino acid sequence SEQ ID NO:254. In another embodiment, a modified antibody of the invention comprises a VH domain having the amino acid sequence SEQ ID NO:48. In certain embodiments, the above-referenced antibodies comprise a modified IgG (e.g., IgG1) constant domain, or FcRn binding fragment thereof (e.g., the Fc domain or hinge-Fc domain), described herein, and preferably the modified IgG constant domain comprises the YTE modification (e.g., MEDI-524-YTE).

[0198] The present invention provides antibodies that immunospecifically bind to one or more RSV antigens (e.g., RSV F antigen), said antibodies comprising a VL chain having an amino acid sequence of any one of the VL chains listed in Table 2. In certain embodiments, the above-referenced antibodies comprise a modified IgG (e.g., IgG1) constant domain, or FcRn binding fragment thereof (e.g., the Fc domain or hinge-Fc domain), described herein, and preferably the modified IgG constant domain comprises the YTE modification (e.g., MEDI-524-YTE).

[0199] The present invention also provides antibodies that immunospecifically bind to one or more RSV antigens (e.g., RSV F antigens), said antibodies comprising a VL domain having an amino acid sequence of any one of the VL domains listed in Table 2. The present invention also provides antibodies that immunospecifically bind to one or more RSV antigens (e.g., RSV F antigens), said antibodies comprising one or more VL CDRs having an amino acid sequence of any one of the VL CDRs listed in Table 2 and/or Tables 3D-3F. In some embodiments, the antibody comprises one, two or three of the VL CDRs listed in Table 2 and/or Tables 3D-3F. In certain embodiments, the above-referenced antibodies comprise a modified IgG (e.g., IgG1) constant domain, or FcRn binding fragment thereof (e.g., the Fc domain or hinge-Fc domain), described herein, and preferably the modified IgG constant domain comprises the YTE modification (e.g., MEDI-524-YTE).

[0200] In one embodiment of the present invention, the antibodies comprise a VL CDR1 having the amino acid sequence of SEQ ID NO:4, SEQ ID NO:14, SEQ ID NO:22, SEQ ID NO:31, SEQ ID NO:39, SEQ ID NO:47, SEQ ID NO:72, SEQ ID NO:314, SEQ ID NO:320, or SEQ ID NO:335. In another embodiment, antibodies of the invention comprise a VL CDR2 having the amino acid sequence of SEQ ID NO:5, SEQ ID NO:15, SEQ ID NO:23, SEQ ID NO:27, SEQ ID NO:32, SEQ ID NO:35, SEQ ID NO:43, SEQ ID NO:50, SEQ ID NO:53, SEQ ID NO:57, SEQ ID NO:59, SEQ ID NO:63, SEQ ID NO:66, SEQ ID NO:69, SEQ ID NO:73, SEQ ID NO:75, SEQ ID NO:77, SEQ ID NO:308, SEQ ID NO:315, SEQ ID NO:321, SEQ ID NO:326, SEQ ID NO:332, or SEQ ID NO:336. In another embodiment, antibodies of the invention comprise a VL CDR3 having the amino acid sequence of SEQ ID NO:6, SEQ ID NO:16 or SEQ ID NO:61. In another embodiment, antibodies of the invention comprise a VL CDR1 having the amino acid sequence of SEQ ID NO:4, SEQ ID NO:14, SEQ ID NO:22, SEQ ID NO:31, SEQ ID NO:39, SEQ ID NO:47, SEQ ID NO:72, SEQ ID NO:314, SEQ ID NO:320, or SEQ ID NO:335, a VL CDR2 having the amino acid sequence of SEQ ID NO:5, SEQ ID NO:15, SEQ ID NO:23, SEQ ID NO:27, SEQ ID NO:32, SEQ ID NO:35, SEQ ID NO:43, SEQ ID NO:50, SEQ ID NO:53, SEQ ID NO:57, SEQ ID NO:59, SEQ ID NO:63, SEQ ID NO:66, SEQ ID NO:69, SEQ ID NO:73, SEQ ID NO:75, SEQ ID NO:77, SEQ ID NO:308, SEQ ID NO:315, SEQ ID NO:321, SEQ ID NO:326, SEQ ID NO:332, or SEQ ID NO:336, and a VL CDR3 having the amino acid sequence of SEQ ID NO:6, SEQ ID NO:16 or SEQ ID NO:61. In a preferred embodiment, antibodies of the invention comprise a VL CDR1 having the amino acid sequence of SEQ ID NO:39, a VLCDR2 having the amino acid sequence of SEQ ID NO:5, and a VLCDR3 having the amino acid sequence of SEQ ID NO:6. In a specific embodiment, the antibodies have a high affinity for RSV antigen (e.g., RSV F antigen). In certain embodiments, the above-referenced antibodies comprise a modified IgG (e.g., IgG1) constant domain, or FcRn binding fragment thereof (e.g., the Fc domain or hinge-Fc domain), described herein, and preferably the modified IgG constant domain comprises the YTE modification (e.g., MEDI-524-YTE).

[0201] In one embodiment the amino acid sequence of the VL domain of an antibody of the invention is:

D I Q M T Q S P S T L S A S V
G D R V T I T C S A S S R V G
Y M H W Y Q Q K P G K A P K L
L I Y D T S K L A S G V P S R
F S G S G S G T E F T L T I S
S L Q P D D F A T Y Y C F O G
S G Y P F T F G G G T K V* E I
K

(SEQ ID NO:11), wherein the three underlined regions indicate the VL CDR1, CDR2, and CDR3 regions, respectively; the four non-underlined regions correlate with the VL FR1, FR2, FR3, FR4, respectively; the asterisk indicates the position of an L→V mutation in VL FR4 as compared to the VL FR4 of palivizumab shown in FIG. 1A. This VL domain (SEQ ID NO:11) is identical to that of the MEDI-524 antibody described elsewhere herein and shown in FIG. 13B. In some embodiments, this VL framework can be used in combination with any of the VL CDRs identified in Table 1 and/or Tables 3D-3F. In one embodiment, the MEDI-524 antibody comprises the VL domain of FIG. 13B (SEQ ID NO:209) and the C-kappa constant domain described in Johnson et al. (1997) J Infect. Dis. 176, 1215-1224 and U.S. Pat. No. 5,824,307, wherein said antibody comprises a modified IgG, such as a modified IgG1, constant domain, or FcRn-binding fragment thereof. In one embodiment, an antibody of the invention comprises a VL chain having the amino acid sequence of SEQ ID NO:209 and/or a VL domain having the amino acid sequence of SEQ ID NO:8. In another embodiment, an antibody of the invention comprises a VL chain having the amino acid sequence SEQ ID NO:255 and/or a VL domain having the amino acid sequence SEQ ID NO:11. In certain embodiments, the above-referenced antibodies comprise a modified IgG (e.g., IgG1) constant domain, or FcRn binding fragment thereof (e.g., the Fc domain or hinge-Fc domain), described herein, and preferably the modified IgG constant domain comprises the YTE modification (e.g., MEDI-524-YTE).

[0202] The present invention further provides antibodies that immunospecifically bind to one or more RSV antigens (e.g., RSV F antigen), wherein the antibody comprises any VH chain disclosed herein combined with any VL chain disclosed herein, or any other VL chain. The present invention also provides antibodies that immunospecifically bind to one or more RSV antigens (e.g., RSV F antigen), wherein the antibody comprises any VL chain disclosed herein combined with any VH chain disclosed herein, or any other VH chain. In certain embodiments, the above-referenced antibodies comprise a modified IgG (e.g., IgG1) constant domain, or FcRn binding fragment thereof (e.g., the Fc domain or hinge-Fc domain), described herein, and preferably the modified IgG constant domain comprises the YTE modification (e.g., MEDI-524-YTE).

[0203] The present invention also provides antibodies that immunospecifically bind to one or more RSV antigens (e.g., RSV F antigens), said antibodies comprising any VH domain disclosed herein combined with any VL domain disclosed herein, or any other VL domain. The present invention further provides antibodies that immunospecifically bind to one or more RSV antigens (e.g., RSV F antigens), said antibodies comprising any VL domain disclosed herein combined with any VH domain disclosed herein, or any other VH domain. In certain embodiments, the above-referenced antibodies comprise a modified IgG (e.g., IgG1) constant domain, or FcRn binding fragment thereof (e.g., the Fc domain or hinge-Fc domain), described herein, and preferably the modified IgG constant domain comprises the YTE modification (e.g., MEDI-524-YTE).

[0204] In a specific embodiment, antibodies that immunospecifically bind to a RSV antigen (e.g., RSV F antigens) comprise a VH domain having the amino acid sequence of SEQ ID NO:7, SEQ ID NO:9, SEQ ID NO:17, SEQ ID NO:24, SEQ ID NO:28, SEQ ID NO:33, SEQ ID NO:36, SEQ ID NO:40, SEQ ID NO:44, SEQ ID NO:48, SEQ ID NO:51, SEQ ID NO:55, SEQ ID NO:67, SEQ ID NO:78, SEQ ID NO:304, SEQ ID NO:310, SEQ ID NO:317, SEQ ID NO:323, or SEQ ID NO:328, and a VL domain having the amino acid sequence of SEQ ID NO:8, SEQ ID NO:13, SEQ ID NO:21, SEQ ID NO:26, SEQ ID NO:30, SEQ ID NO:34, SEQ ID NO:38, SEQ ID NO:42, SEQ ID NO:46, SEQ ID NO:49, SEQ ID NO:52, SEQ ID NO:54, SEQ ID NO:56, SEQ ID NO:58, SEQ ID NO:60, SEQ ID NO:62, SEQ ID NO:64, SEQ ID NO:65, SEQ ID NO:68, SEQ ID NO:70, SEQ ID NO:71, SEQ ID NO:74, SEQ ID NO:76, SEQ ID NO:307, SEQ ID NO:313, SEQ ID NO:319, SEQ ID NO:325, SEQ ID NO:331, or SEQ ID NO:334. In a preferred embodiment, antibodies that immunospecifically bind to a RSV F antigen comprise a VH domain having the amino acid sequence of SEQ ID NO:48 and a VL domain comprising the amino acid sequence of SEQ ID NO:11. In another specific embodiment, the antibodies of the invention have a high affinity and/or high avidity for a RSV antigen (e.g., RSV F antigen). In certain embodiments, the above-referenced antibodies comprise a modified IgG (e.g., IgG1) constant domain, or FcRn binding fragment thereof (e.g., the Fc domain or hinge-Fc domain), described herein, and preferably the modified IgG constant domain comprises the YTE modification (e.g., MEDI-524-YTE).

[0205] The present invention further provides antibodies that specifically bind to a RSV antigen (e.g., RSV F antigen), wherein the antibody comprises any VH CDR1 disclosed herein, optionally in combination with any VH CDR2 disclosed herein (or other VH CDR2), and/or optionally in combination with any VH CDR3 disclosed herein (or other VH CDR3)), and/or optionally in combination with any VL CDR1 disclosed herein (or other VL CDR1), and/or optionally in combination with any VL CDR2 disclosed herein (or other VL CDR2), and/or optionally in combination with any VL CDR3 disclosed herein (or other VL CDR3). The present invention also provides antibodies that specifically bind to a RSV antigen (e.g., RSV F antigen), wherein the antibody comprises any VH CDR2 disclosed herein, optionally in combination with any VH CDR1 disclosed herein (or other VH CDR1), and/or optionally in combination with any VH CDR3 disclosed herein (or other VH CDR3)), and/or optionally in combination with any VL CDR1 disclosed herein (or other VL CDR1), and/or optionally in combination with any VL CDR2 disclosed herein (or other VL CDR2), and/or optionally in combination with any VL CDR3 disclosed herein (or other VL CDR3). The present invention also provides antibodies that specifically bind to a RSV antigen (e.g., RSV F antigen), wherein the antibody comprises any VH CDR3 disclosed herein, optionally in combination with any VH CDR1 disclosed herein (or other VH CDR1), and/or optionally in combination with any VH CDR2 disclosed herein (or other VH CDR3)), and/or optionally in combination with any VL CDR1 disclosed herein (or other VL CDR1), and/or optionally in combination with any VL CDR2 disclosed herein (or other VL CDR2), and/or optionally in combination with any VL CDR3 disclosed herein (or other VL CDR3). The present invention also provides antibodies that specifically bind to a RSV antigen (e.g., RSV F antigen), wherein the antibody comprises any VL CDR1 disclosed herein, optionally in combination with any VH CDR1 disclosed herein (or other VH CDR1), and/or optionally in combination with any VH CDR2 disclosed herein (or other VH CDR2)), and/or optionally in combination with any VH CDR3 disclosed herein (or other VH CDR3), and/or optionally in combination with any VL CDR2 disclosed herein (or other VL CDR2), and/or optionally in combination with any VL CDR3 disclosed herein (or other VL CDR3). The present invention fuirther provides antibodies that specifically bind to a RSV antigen (e.g., RSV F antigen), wherein the antibody comprises any VL CDR2 disclosed herein, optionally in combination with any VH CDR1 disclosed herein (or other VH CDR1), and/or optionally in combination with any VH CDR2 disclosed herein (or other VH CDR2)), and/or optionally in combination with any VH CDR3 disclosed herein (or other VH CDR3), and/or optionally in combination with any VL CDR1 disclosed herein (or other VL CDR1), and/or optionally in combination with any VL CDR3 disclosed herein (or other VL CDR3). The present invention also provides antibodies that specifically bind to a RSV antigen (e.g., RSV F antigen), wherein the antibody comprises any VL CDR3 disclosed herein, optionally in combination with any VH CDR1 disclosed herein (or other VH CDR1), and/or optionally in combination with any VH CDR2 disclosed herein (or other VH CDR2)), and/or optionally in combination with any VH CDR3 disclosed herein (or other VH CDR3), and/or optionally in combination with any VL CDR1 disclosed herein (or other VL CDR1), and/or optionally in combination with any VL CDR2 disclosed herein (or other VL CDR2). In certain embodiments, the above-referenced antibodies comprise a modified IgG (e.g., IgG1) constant domain, or FcRn binding fragment thereof (e.g., the Fc domain or hinge-Fc domain), described herein, and preferably the modified IgG constant domain comprises the YTE modification (e.g., MEDI-524-YTE).

[0206] The present invention also provides antibodies comprising one or more VH CDRs and one or more VL CDRs listed in Table 2 and/or Tables 3A-3F. In particular, the invention provides for an antibody comprising a VH CDR1 and a VL CDR1; a VH CDR1 and a VL CDR2; a VH CDR1 and a VL CDR3; a VH CDR2 and a VL CDR1; VH CDR2 and VL CDR2; a VH CDR2 and a VL CDR3; a VH CDR3 and a VH CDR1; a VH CDR3 and a VL CDR2; a VH CDR3 and a VL CDR3; a VHl CDR1, a V CDR2 and a VL CDR1; a VH CDR1, a VH CDR2 and a VL CDR2; a VH CDR1, a VH CDR2 and a VL CDR3; a VH CDR2, a VH CDR3 and a VL CDR1, a VH CDR2, a VH CDR3 and a VL CDR2; a VH CDR2, a VH CDR2 and a VL CDR3; a VH CDR1, a VL CDR1 and a VL CDR2; a VH CDR1, a VL CDR1 and a VL CDR3; a VH CDR2, a VL CDR1 and a VL CDR2; a VH CDR2, a VL CDR1 and a VL CDR3; a VH CDR3, a VL CDR1 and a VL CDR2; a VH CDR3, a VL CDR1 and a VL CDR3; a VH CDR1, a VH CDR2, a VH CDR3 and a VL CDR1; a VH CDR1, a VH CDR2, a VH CDR3 and a VL CDR2; a VH CDR1, a VH CDR2, a VH CDR3 and a VL CDR3; a VH CDR1, a VH CDR2, a VL CDR1 and a VL CDR2; a VH CDR1, a VH CDR2, a VL CDR1 and a VL CDR3; a VH CDR1, a VH CDR3, a VL CDR1 and a VL CDR2; a VH CDR1, a VH CDR3, a VL CDR1 and a VL CDR3; a VH CDR2, a VH CDR3, a VL CDR1 and a VL CDR2; a VH CDR2, a VH CDR3, a VL CDR1 and a VL CDR3; a VH CDR2, a VH CDR3, a VL CDR2 and a VL CDR3; a VH CDR1, a VH CDR2, a VH CDR3, a VL CDR1 and a VL CDR2; a VH CDR1, a VH CDR2, a VH CDR3, a VL CDR1 and a VL CDR3; a VH CDR1, a VH CDR2, a VL CDR1, a VL CDR2, and a VL CDR3; a VH CDR1, a VH CDR3, a VL CDR1, a VL CDR2, and a VL CDR3; a VH CDR2, a VH CDR3, a VL CDR1, a VL CDR2, and a VL CDR3; or any combination thereof of the VH CDRs and VL CDRs listed in Table 2 and/or Tables 3A-3F. In a specific embodiment, the antibodies of the invention have a high affinity and/or high avidity for a RSV antigen (e.g., RSV F antigen). In certain embodiments, the above-referenced antibodies comprise a modified IgG (e.g., IgG1) constant domain, or FcRn binding fragment thereof (e.g., the Fc domain or hinge-Fc domain), described herein, and preferably the modified IgG constant domain comprises the YTE modification (e.g., MEDI-524-YTE).

[0207] The invention also provides for an antibody that immunospecifically binds to a RSV F antigen, comprising a VH CDR1 and a VL CDR1, a VH CDR1 and a VL CDR2, a VH CDR1 and a VL CDR3, a VH CDR1 and a VL CDR1; a VH CDR1 and a VL CDR2; a VH CDR1 and a VL CDR3; a VH CDR2 and a VL CDR1; VH CDR2 and VL CDR2; a VH CDR2 and a VL CDR3; a VH CDR3 and a VH CDR1; a VH CDR3 and a VL CDR2; a VH CDR3 and a VL CDR3; a VH1 CDR1, a VH CDR2 and a VL CDR1; a VH CDR1, a VH CDR2 and a VL CDR2; a VH CDR1, a VH CDR2 and a VL CDR3; a VH CDR2, a VH CDR3 and a VL CDR1, a VH CDR2, a VH CDR3 and a VL CDR2; a VH CDR2, a VH CDR2 and a VL CDR3; a VH CDR1, a VL CDR1 and a VL CDR2; a VH CDR1, a VL CDR1 and a VL CDR3; a VH CDR2, a VL CDR1 and a VL CDR2; a VH CDR2, a VL CDR1 and a VL CDR3; a VH CDR3, a VL CDR1 and a VL CDR2; a VH CDR3, a VL CDR1 and a VL CDR3; a VH CDR1, a VH CDR2, a VH CDR3 and a VL CDR1; a VH CDR1, a VH CDR2, a VH CDR3 and a VL CDR2; a VH CDR1, a VH CDR2, a VH CDR3 and a VL CDR3; a VH CDR1, a VH CDR2, a VL CDR1 and a VL CDR2; a VH CDR1, a VH CDR2, a VL CDR1 and a VL CDR3; a VH CDR1, a VH CDR3, a VL CDR1 and a VL CDR2; a VH CDR1, a VH CDR3, a VL CDR1 and a VL CDR3; a VH CDR2, a VH CDR3, a VL CDR1 and a VL CDR2; a VH CDR2, a VH CDR3, a VL CDR1 and a VL CDR3; a VH CDR2, a VH CDR3, a VL CDR2 and a VL CDR3; a VH CDR1, a VH CDR2, a VH CDR3, a VL CDR1 and a VL CDR2; a VH CDR1, a VH CDR2, a VH CDR3, a VL CDR1 and a VL CDR3; a VH CDR1, a VH CDR2, a VL CDR1, a VL CDR2, and a VL CDR3; a VH CDR1, a VH CDR3, a VL CDR1, a VL CDR2, and a VL CDR3; a VH CDR2, a VH CDR3, a VL CDR1, a VL CDR2, and a VL CDR3; or any combination thereof of the VH CDRs and VL CDRs listed in Table 2 and/or Tables 3A-3F, supra. In another specific embodiment, the antibodies of the invention have a high affinity and/or high avidity for a RSV antigen (e.g., RSV F antigen). In certain embodiments, the above-referenced antibodies comprise a modified IgG (e.g., IgG1) constant domain, or FcRn binding fragment thereof (e.g., the Fc domain or hinge-Fc domain), described herein, and preferably the modified IgG constant domain comprises the YTE modification (e.g., MEDI-524-YTE).

[0208] In one embodiment, an antibody of the invention comprises a VH CDR1 having the amino acid sequence of SEQ ID NO:1, SEQ ID NO:10 or SEQ ID NO:18 and a VL CDR1 having the amino acid sequence of SEQ ID NO:4, SEQ ID NO:14, SEQ ID NO:22, SEQ ID NO:31, SEQ ID NO:39, SEQ ID NO:47, SEQ ID NO:314, SEQ ID NO:320, or SEQ ID NO:335. In another embodiment, an antibody of the invention comprises a VH CDR1 having the amino acid sequence of SEQ ID NO:1, SEQ ID NO:10 or SEQ ID NO:18 and a VL CDR2 having the amino acid sequence of SEQ ID NO:5, SEQ ID NO:15, SEQ ID NO:23, SEQ ID NO:27, SEQ ID NO:32, SEQ ID NO:35, SEQ ID NO:43, SEQ ID NO:50, SEQ ID NO:53, SEQ ID NO:57, SEQ ID NO:59, SEQ ID NO:63, SEQ ID NO:66, SEQ ID NO:69, SEQ ID NO:73, SEQ ID NO:75, SEQ ID NO:77, SEQ ID NO:308, SEQ ID NO:315, SEQ ID NO:321, SEQ ID NO:326, SEQ ID NO:332, or SEQ ID NO:336. In another embodiment, an antibody of the invention comprises a VH CDR1 having the amino acid sequence of SEQ ID NO:1, SEQ ID NO:10 or SEQ ID NO:18 and a VL CDR3 having the amino acid sequence of SEQ ID NO:6, SEQ ID NO:16 or SEQ ID NO:61. In accordance with these embodiments, the antibody immunospecifically binds to a RSV F antigen. In certain embodiments, the above-referenced antibodies comprise a modified IgG (e.g., IgG1) constant domain, or FcRn binding fragment thereof (e.g., the Fc domain or hinge-Fc domain), described herein, and preferably the modified IgG constant domain comprises the YTE modification (e.g., MEDI-524-YTE).

[0209] In another embodiment, an antibody of the invention comprises a VH CDR2 having the amino acid sequence of SEQ ID NO:2, SEQ ID NO:19, SEQ ID NO:25, SEQ ID NO:37, SEQ ID NO:41, SEQ ID NO:45, SEQ ID NO:305, or SEQ ID NO:329, and a VL CDR1 having the amino acid sequence of SEQ ID NO:4, SEQ ID NO:14, SEQ ID NO:22, SEQ ID NO:31, SEQ ID NO:39, SEQ ID NO:47, SEQ ID NO:314, SEQ ID NO:320, or SEQ ID NO:335. In another embodiment, an antibody of the invention comprises a VH CDR2 having the amino acid sequence of SEQ ID NO:2, SEQ ID NO:19, SEQ ID NO:25, SEQ ID NO:37, SEQ ID NO:41, SEQ ID NO:45, SEQ ID NO:305, or SEQ ID NO:329, and a VL CDR2 having the amino acid sequence of SEQ ID NO:5, SEQ ID NO:15, SEQ ID NO:23, SEQ ID NO:27, SEQ ID NO:32, SEQ ID NO:35, SEQ ID NO:43, SEQ ID NO:50, SEQ ID NO:53, SEQ ID NO:57, SEQ ID NO:59, SEQ ID NO:63, SEQ ID NO:66, SEQ ID NO:69, SEQ ID NO:73, SEQ ID NO:75, SEQ ID NO:77, SEQ ID NO:308, SEQ ID NO:315, SEQ ID NO:321, SEQ ID NO:326, SEQ ID NO:332, or SEQ ID NO:336. In another embodiment, an antibody of the invention comprises a VH CDR2 having the amino acid sequence of SEQ ID NO:2, SEQ ID NO:19, SEQ ID NO:25, SEQ ID NO:37, SEQ ID NO:41, SEQ ID NO:45, SEQ ID NO:305, or SEQ ID NO:329, and a VL CDR3 having the amino acid sequence of SEQ ID NO:6, SEQ ID NO:16, or SEQ ID NO:61. In accordance with these embodiments, the antibody immunospecifically binds to a RSV F antigen. In certain embodiments, the above-referenced antibodies comprise a modified IgG (e.g., IgG1) constant domain, or FcRn binding fragment thereof (e.g., the Fc domain or hinge-Fc domain), described herein, and preferably the modified IgG constant domain comprises the YTE modification (e.g., MEDI-524-YTE).

[0210] In another embodiment, an antibody of the invention comprises a VH CDR3 having the amino acid sequence of SEQ ID NO:3, SEQ ID NO:12, SEQ ID NO:20, SEQ ID NO:29, SEQ ID NO:79, or SEQ ID NO:311, and a VL CDR1 having the amino acid sequence of SEQ ID NO:4, SEQ ID NO:14, SEQ ID NO:22, SEQ ID NO:31, SEQ ID NO:39, SEQ ID NO:47, SEQ ID NO:314, SEQ ID NO:320, or SEQ ID NO:335. In another embodiment, an antibody of the invention comprises a VH CDR3 having the amino acid sequence of SEQ ID NO:3, SEQ ID NO:12, SEQ ID NO:20, SEQ ID NO:29, SEQ ID NO:79, or SEQ ID NO:311, and a VL CDR2 having the amino acid sequence of SEQ ID NO:5, SEQ ID NO:15, SEQ ID NO:23, SEQ ID NO:27, SEQ ID NO:32, SEQ ID NO:35, SEQ ID NO:43, SEQ ID NO:50, SEQ ID NO:53, SEQ ID NO:57, SEQ ID NO:59, SEQ ID NO:63, SEQ ID NO:66, SEQ ID NO:69, SEQ ID NO:73, SEQ ID NO:75, SEQ ID NO:77, SEQ ID NO:308, SEQ ID NO:315, SEQ ID NO:321, SEQ ID NO:326, SEQ ID NO:332, or SEQ ID NO:336. In a preferred embodiment, an antibody of the invention comprises a VH CDR3 having the amino acid sequence of SEQ ID NO:3, SEQ ID NO:12, SEQ ID NO:20, SEQ ID NO:29, SEQ ID NO:79, or SEQ ID NO:311, and a VL CDR3 having the amino acid sequence of SEQ ID NO:6, SEQ ID NO:16, or SEQ ID NO:61. In accordance with these embodiments, the antibody immunospecifically binds to a RSV F antigen. In certain embodiments, the above-referenced antibodies comprise a modified IgG (e.g., IgG1) constant domain, or FcRn binding fragment thereof (e.g., the Fc domain or hinge-Fc domain), described herein, and preferably the modified IgG constant domain comprises the YTE modification (e.g., MEDI-524-YTE).

[0211] In some embodiments, modified antibody is a modified MEDI-524 antibody comprising the VH domain of FIG. 13A (SEQ ID NO:48), the VL domain of FIG. 13B, and the C-gamma-I (nGIm) constant domain described in Johnson et al. (1997), J. Infect. Dis. 176, 1215-1224 and U.S. Pat. No. 5,824,307, wherein said antibody comprises a modified IgG, such as a modified IgG1, constant domain, or FcRn-binding fragment thereof. In other embodiments, modified antibody is a modified MEDI-524 antibody comprising the VH domain of FIG. 13A (SEQ ID NO:48), the VL domain of FIG. 13B, and the C-gamma-1 (nG1m) constant domain described in Johnson et al. (1997), J. Infect. Dis. 176, 1215-1224 and U.S. Pat. No. 5,824,307, wherein said antibody comprises one or more of a tyrosine at position 252, a threonine at position 254, and a glutamic acid at position 256 (numbered according to the EU index as in Kabat, supra), and preferably comprises the YTE modification (i.e., a tyrosine at position 252, a threonine at position 254, and a glutamic acid at position 256). In certain embodiments, modified antibody is a modified MEDI-524 antibody comprising the VH domain of FIG. 13A (SEQ ID NO:48), the VL domain of FIG. 13B, and the C-gamma-1 (nG1m) constant domain described in Johnson et al. (1997), J. Infect. Dis. 176, 1215-1224 and U.S. Pat. No. 5,824,307 wherein said antibody comprises a tyrosine at position 252, a threonine at position 254, and a glutamic acid at position 256 (numbered according to the EU index as in Kabat, supra) (hereafter “MEDI-524-YTE”).

[0212] The present invention also provides for a nucleic acid molecule(s) encoding an antibody (modified or unmodified) of the invention. In some embodiments, the nucleic acid molecule(s) encoding the antibody of the invention is isolated. In other embodiments, the nucleic acid molecule(s) encoding the antibody of the invention is not isolated. In yet other embodiments, the nucleic acid molecule(s) encoding the antibody of the invention is integrated, e.g., into chromosomal DNA or an expression vector. In a specific embodiment, nucleic acid molecules of the invention encode for the antibodies or antigen-binding fragments of the antibodies referenced in Table 2, and modified antibodies thereof. In one embodiment, a nucleic acid molecule(s) of the invention encode for AFFF, P12f2, P12f4, P11d4, A1e9, A12a6, A13c4, A17d4, A4B4, A8C7, 1X-493L1FR, H3-3F4, M3H9, Y10H6, DG, AFFF(1), 6H8, L1-7E5, L2-15B10, A13a11, A1h5, A4B4(1), A4B4L1FR-S28R (MEDI-524), A4B4-F52S, A17d4(1), A3e2, A14a4, A16b4, A17b5, A17f5, or A17h4 antibody. In another embodiment, nucleic acid molecule(s) of the invention encode for an antigen-binding fragment of AFFF, P12f2, P12f4, P11d4, A1e9, A12a6, A13c4, A17d4, A4B4, A8C7, 1X-493L1FR, H3-3F4, M3H9, Y10H6, DG, AFFF(1), 6H8, L1-7E5, L2-15B10, A13a11, A1h5, A4B4(1), A4B4L1FR-S28R (MEDI-524), A4B4-F52S, A17d4(1), A3e2, A14a4, A16b4, A17b5, A17f5, or A17h4 antibody. In one embodiment, nucleic acid molecule(s) of the invention encode for A4B4L1FR-S28R (MEDI-524) or an antigen-binding fragment thereof. In an embodiment, nucleic acid molecule(s) of the invention encode for MEDI-524-YTE. In certain embodiments, the above-referenced antibodies comprise a modified IgG (e.g., IgG1) constant domain, or FcRn binding fragment thereof (e.g., the Fc domain or hinge-Fc domain), described herein, and preferably the modified IgG constant domain comprises the YTE modification (e.g., MEDI-524-YTE).

[0213] In another embodiment, a nucleic acid molecule(s) of the invention encodes an antibody that immunospecifically binds to a RSV antigen (e.g., RSV F antigen), the antibody comprising a VH chain having an amino acid sequence of any one of the VH chains listed in Table 2. In another embodiment, a nucleic acid molecule(s) of the invention encodes an antibody that immunospecifically binds a RSV antigen (e.g., RSV F antigen), the antibody comprising a VH domain having an amino acid sequence of any one of the VH domains listed in Table 2. In another embodiment, a nucleic acid molecule(s) of the invention encodes an antibody that immunospecifically binds to a RSV antigen (e.g., RSV F antigen), the antibody comprising a VH CDR1 having an amino acid sequence of any one of the VH CDR1s listed in Table 2 and/or Table 3A. In another embodiment, a nucleic acid molecule(s) of the invention encodes an antibody that immunospecifically binds a RSV antigen (e.g., RSV F antigen), the antibody comprising a VH CDR2 having an amino acid sequence of any one of the VH CDR2s listed in Table 2 and/or Table 3B. In yet another embodiment, a nucleic acid molecule(s) of the invention encodes an antibody that immunospecifically binds a RSV antigen (e.g., RSV F antigen), the antibody comprising a VH CDR3 having an amino acid sequence of any one of the VH CDR3s listed in Table 2 and/or Table 3C. In some embodiments, the nucleic acid encodes a MEDI-524-YTE antibody. In certain embodiments, the above-referenced antibodies comprise a modified IgG (e.g., IgG1) constant domain, or FcRn binding fragment thereof (e.g., the Fc domain or hinge-Fc domain), described herein, and preferably the modified IgG constant domain comprises the YTE modification (e.g., MEDI-524-YTE).

[0214] In another embodiment, a nucleic acid molecule(s) of the invention encodes an antibody that immunospecifically binds to a RSV antigen (e.g., RSV F antigen), the antibody comprising a VL chain having an amino acid sequence of any one of the VL chains listed in Table 2. In one embodiment, a nucleic acid molecule(s) of the invention encodes an antibody that immunospecifically binds a RSV antigen (e.g., RSV F antigen), the antibody comprising a VL domain having an amino acid sequence of any one of the VL domains listed in Table 2. In another embodiment, a nucleic acid molecule(s) of the present invention encodes an antibody that immunospecifically binds a RSV antigen (e.g., RSV F antigen), the antibody comprising a VL CDR1 having amino acid sequence of any one of the VL CDR1s listed in Table 2 and/or Table 3D. In another embodiment, a nucleic acid molecule(s) of the present invention encodes an antibody that immunospecifically binds a RSV antigen (e.g., RSV F antigen), the antibody comprising a VL CDR2 having an amino acid sequence of any one of the VL CDR2s listed in Table 2 and/or Table 3E. In yet another embodiment, a nucleic acid molecule(s) of the present invention encodes an antibody that immunospecifically binds a RSV antigen (e.g., RSV F antigen), the antibody comprising a VL CDR3 having an amino acid sequence of any one of the VL CDR3s listed in Table 2 and/or Table 3F. In certain embodiments, the above-referenced antibodies comprise a modified IgG (e.g., IgG1) constant domain, or FcRn binding fragment thereof (e.g., the Fc domain or hinge-Fc domain), described herein, and preferably the modified IgG constant domain comprises the YTE modification (e.g., MEDI-524-YTE).

[0215] In another embodiment, a nucleic acid molecule(s) comprises a nucleotide sequence encoding a VH domain of an antibody that immunospecifically binds to a RSV antigen (e.g., RSV F antigen), where the VH domain comprises one, two or three VH CDRs having the amino acid sequence of one, two or three of the VH CDRs listed in Table 2 and/or Table 3A-3C. In one embodiment, a nucleic acid molecule(s) comprises a nucleotide sequence encoding a VL domain of an antibody that immunospecifically binds to a RSV antigen (e.g., RSV F antigen), where the VL domain comprises one, two or three VL CDRs having the amino acid sequence of one, two or three of the VL CDRs listed in Table 2 and/or Table 3D-3F. In another embodiment, a nucleic acid molecule(s) comprises a nucleotide sequence encoding a VH chain of an antibody that immunospecifically binds to a RSV antigen (e.g., RSV F antigen), where the VH chain comprises one, two or three VH CDRs having the amino acid sequence of one, two or three of the VH CDRs listed in Table 2 and/or Table 3A-3C. In another embodiment, a nucleic acid molecule(s) comprises a nucleotide sequence encoding a VL chain of an antibody that immunospecifically binds to a RSV antigen (e.g., RSV F antigen), where the VL chain comprises one, two or three VL CDRs having the amino acid sequence of one, two or three of the VL CDRs listed in Table 2 and/or Table 3D-3F. In certain embodiments, the above-referenced antibodies comprise a modified IgG (e.g., IgG1) constant domain, or FcRn binding fragment thereof (e.g., the Fc domain or hinge-Fc domain), described herein, and preferably the modified IgG constant domain comprises the YTE modification (e.g, MEDI-524-YTE).

[0216] In another embodiment, a nucleic acid molecule(s) of the invention encodes an antibody that immunospecifically binds to a RSV antigen (e.g., RSV F antigen), the antibody comprising a VH domain comprising an amino acid sequence of any one of the VH chains listed in Table 2. In another embodiment, a nucleic acid molecule(s) of the invention encodes an antibody that immunospecifically binds to a RSV antigen (e.g., RSV F antigen), the antibody comprising a VL domain having an amino acid sequence of any one of the VH chains listed in Table 2. In another embodiment, a nucleic acid molecule(s) of the invention encodes an antibody that immunospecifically binds to a RSV antigen (e.g., RSV F antigen), the antibody comprising a VH domain having an amino acid sequence of any one of the VH domains listed in Table 2 and a VL domain having an amino acid sequence of any one of the VL domains listed in Table 2 and/or Tables 3D-3F. In another embodiment, a nucleic acid molecule(s) of the invention encodes a modified antibody that immunospecifically binds a RSV antigen (e.g., RSV F antigen), the antibody comprising a VH CDR1, a VL CDR1, a VH CDR2, a VL CDR2, a VH CDR3, a VL CDR3, or any combination thereof having an amino acid sequence listed in Table 2 and/or Tables 3A-3F. In certain embodiments, the above-referenced antibodies comprise a modified IgG (e.g., IgG1) constant domain, or FcRn binding fragment thereof (e.g., the Fc domain or hinge-Fc domain), described herein, and preferably the modified IgG constant domain comprises the YTE modification (e.g., MEDI-524-YTE).

[0217] In another embodiment, the invention provides a nucleic acid molecule(s) encoding an antibody that immunospecifically binds to a RSV antigen, the antibody comprising a VH CDR1 and a VL CDR1; a VH CDR1 and a VL CDR2; a VH CDR1 and a VL CDR3; a VH CDR2 and a VL CDR1; VH CDR2 and VL CDR2; a VH CDR2 and a VL CDR3; a VH CDR3 and a VH CDR1; a VH CDR3 and a VL CDR2; a VH CDR3 and a VL CDR3; a VH1 CDR1, a VH CDR2 and a VL CDR1; a VH CDR1, a VH CDR2 and a VL CDR2; a VH CDR1, a VH CDR2 and a VL CDR3; a VH CDR2, a VH CDR3 and a VL CDR1, a VH CDR2, a VH CDR3 and a VL CDR2; a VH CDR2, a VH CDR2 and a VL CDR3; a VH CDR1, a VL CDR1 and a VL CDR2; a VH CDR1, a VL CDR1 and a VL CDR3; a VH CDR2, a VL CDR1 and a VL CDR2; a VH CDR2, a VL CDR1 and a VL CDR3; a VH CDR3, a VL CDR1 and a VL CDR2; a VH CDR3, a VL CDR1 and a VL CDR3; a VH CDR1, a VH CDR2, a VH CDR3 and a VL CDR1; a VH CDR1,, a VH CDR2, a VH CDR3 and a VL CDR2; a VH CDR1, a VH CDR2, a VH CDR3 and a VL CDR3; a VH CDR1, a VH CDR2, a VL CDR1 and a VL CDR2; a VH CDR1, a VH CDR2, a VL CDR1 and a VL CDR3; a VH CDR1, a VH CDR3, a VL CDR1 and a VL CDR2; a VH CDR1, a VH CDR3, a VL CDR1 and a VL CDR3; a VH CDR2, a VH CDR3, a VL CDR1 and a VL CDR2; a VH CDR2, a VH CDR3, a VL CDR1 and a VL CDR3; a VH CDR2, a VH CDR3, a VL CDR2 and a VL CDR3; a VH CDR1, a VH CDR2, a VH CDR3, a VL CDR1 and a VL CDR2; a VH CDR1, a VH CDR2, a VH CDR3, a VL CDR1 and a VL CDR3; a VH CDR1, a VH CDR2, a VL CDR1, a VL CDR2, and a VL CDR3; a VH CDR1, a VH CDR3, a VL CDR1, a VL CDR2, and a VL CDR3; a VH CDR2, a VH CDR3, a VL CDR1, a VL CDR2, and a VL CDR3; or any combination thereof of the VH CDRs and VL CDRs listed in Table 2 and/or Tables 3A-3F. In certain embodiments, the above-referenced antibodies comprise a modified IgG (e.g., IgG1) constant domain, or FcRn binding fragment thereof (e.g., the Fc domain or hinge-Fc domain), described herein, and preferably the modified IgG constant domain comprises the YTE modification (e.g., MEDI-524-YTE).

[0218] The present invention also provides antibodies that immunospecifically bind to a RSV antigen (e.g., RSV F antigen), the antibodies comprising derivatives of the VH domains, VH CDRs, VL domains, and VL CDRs described herein that immunospecifically bind to a RSV antigen. The present invention also provides antibodies comprising derivatives of palivizumab, AFFF, P12f2, P12f4, P11d4, A1e9, A12a6, A13c4, A17d4, A4B4, A8C7, 1X-493L1FR, H3-3F4, M3H9, Y10H6, DG, AFFF(1), 6H8, L1-7E5, L2-15B10, A13a11, A1h5, A4B4(1), A4B4L1FR-S28R (MEDI-524), A4B4-F52S, A17d4(1), A3e2, A14a4, A16b4, A17b5, A17f5, or Al7h4, wherein said antibodies immunospecifically bind to one or more RSV antigens (e.g., RSV F antigen). Standard techniques known to those of skill in the art can be used to introduce mutations in the nucleotide sequence encoding a molecule of the invention, including, for example, site-directed mutagenesis and PCR-mediated mutagenesis which results in amino acid substitutions. Preferably, the derivatives include less than 25 amino acid substitutions, less than 20 amino acid substitutions, less than 15 amino acid substitutions, less than 10 amino acid substitutions, less than 5 amino acid substitutions, less than 4 amino acid substitutions, less than 3 amino acid substitutions, or less than 2 amino acid substitutions relative to the original molecule. In a preferred embodiment, the derivatives have conservative amino acid substitutions are made at one or more predicted non-essential amino acid residues. A “conservative amino acid substitution” is one in which the amino acid residue is replaced with an amino acid residue having a side chain with a similar charge. Families of amino acid residues having side chains with similar charges have been defined in the art. These families include amino acids with basic side chains (e.g., lysine, arginine, histidine), acidic side chains (e.g., aspartic acid, glutamic acid), uncharged polar side chains (e.g., glycine, asparagine, glutamine, serine, threonine, tyrosine, cysteine), nonpolar side chains (e.g., alanine, valine, leucine, isoleucine, proline, phenylalanine, methionine, tryptophan), beta-branched side chains (e.g., threonine, valine, isoleucine) and aromatic side chains (e.g., tyrosine, phenylalanine, tryptophan, histidine). Alternatively, mutations can be introduced randomly along all or part of the coding sequence, such as by saturation mutagenesis, and the resultant mutants can be screened for biological activity to identify mutants that retain activity. Following mutagenesis, the encoded protein can be expressed and the activity of the protein can be determined. In certain embodiments, the above-referenced antibodies comprise a modified IgG (e.g., IgG1) constant domain, or FcRn binding fragment thereof (e.g., the Fc domain or hinge-Fc domain), described herein, and preferably the modified IgG constant domain comprises the YTE modification (e.g., MEDI-524-YTE).

[0219] The present invention provides antibodies that immunospecifically bind to a RSV antigen (e.g., RSV F antigen), said antibodies comprising the amino acid sequence of the variable heavy domain and/or variable light domain or an antigen-binding fragment thereof of AFFF, P12f2, P12f4, P11d4, A1e9, A12a6, A13c4, A17d4, A4B4, A8C7, 1X-493L1FR, H3-3F4, M3H9, Y10H6, DG, AFFF(1), 6H8, L1-7E5, L2-15B10, A13a11, A1h5, A4B4(1), A4B4L1FR-S28R (MEDI-524), A4B4-F52S, A17d4(1), A3e2, A14a4, A16b4, A17b5, A17f5, or A17h4 with one or more amino acid residue substitutions in the variable heavy domain and/or variable light domain or antigen-binding fragment. The present invention also provides for antibodies that immunospecifically bind to a RSV antigen (e.g., RSV F antigen), said antibodies comprising the amino acid sequence of the variable heavy domain and/or variable light domain or an antigen-binding fragment thereof of AFFF, P12f2, P12f4, P11d4, A1e9, A12a6, A13c4, A17d4, A4B4, A8C7, 1X-493L1FR, H3-3F4, M3H9, Y10H6, DG, AFFF(1), 6H8, L1-7E5, L2-15B10, A13a11, A1h5, A4B4(1), A4B4L1FR-S28R (MEDI-524), A4B4-F52S, A17d4(1), A3e2, A14a4, A16b4, A17b5, A17f5, or A17h4 with one or more amino acid residue substitutions in one or more VH CDRs and/or one or more VL CDRs. Non-limiting examples of amino acid residues in the VH CDRs and VL CDRs of AFFF, P12f2, P12f4, P11d4, A1e9, A12a6, A13c4, A17d4, A4B4, A8C7, 1X-493L1FR, H3-3F4, M3H9, Y10H6, DG, AFFF(1), 6H8, L1-7E5, L2-15B10, A13a11, A1h5, A4B4(1), A4B4L1FR-S28R (MEDI-524), A4B4-F52S, A17d4(1), A3e2, A14a4, A16b4, A17b5, A17f5, or A17h4, which may be substitute bold in Table 2. In certain embodiments, the above-referenced antibodies comprise a modified IgG (e.g., IgG1) constant domain, or FcRn binding fragment thereof (e.g., the Fc domain or hinge-Fc domain), described herein, and preferably the modified IgG constant domain comprises the YTE modification (e.g., MEDI-524-YTE).

[0220] The present invention also provides antibodies that immunospecifically bind to a RSV antigen, said antibodies comprising the amino acid sequence of the VH domain and/or VL domain or an antigen-binding fragment thereof of AFFF, P12f2, P12f4, P11d4, A1e9, A12a6, A13c4, A17d4, A4B4, A8C7, 1X-493L1FR, H3-3F4, M3H9, Y10H6, DG, AFFF(1), 6H8, L1-7E5, L2-15B10, A13a11, A1h5, A4B4(1), A4B4L1FR-S28R (MEDI-524), A4B4-F52S, A17d4(1), A3e2, A14a4, A16b4, A17b5, A17f5, or A17h4 with one more more amino acid residue substitutions in one or more VH frameworks and/or one or more VL frameworks. The antibody generated by introducing substitutions in the VH domain, VH CDRs, VL domain, VL CDRs and/or frameworks of AFFF, P12f2, P12f4, P11d4, A1e9, A12a6, A13c4, A17d4, A4B4, A8C7, 1X-493L1FR, H3-3F4, M3H9, Y10H6, DG, AFFF(1), 6H8, L1-7E5, L2-15B10, A13a11, A1h5, A4B4(1), A4B4L1FR-S28R (MEDI-524), A4B4-F52S, A17d4(1), A3e2, A14a4, A16b4, A17b5, A17f5, or A17h4 can be tested in vitro and/or in vivo, for example, for its ability to bind to a RSV antigen, or for its ability to prevent, manage, treat and/or ameliorate a RSV infection (e.g., acute RSV disease, or a RSV URI and/or LRI), otitis media (preferably, stemming from, caused by or associated with a RSV infection, such as a RSV URI and/or LRI), and/or a symptom or respiratory condition relating thereto (e.g., asthma, wheezing, and/or RAD). In certain embodiments, the above-referenced antibodies comprise a modified IgG (e.g., IgG1) constant domain, or FcRn binding fragment thereof (e.g., the Fc domain or hinge-Fc domain), described herein, and preferably the modified IgG constant domain comprises the YTE modification (e.g., MEDI-524-YTE).

[0221] In a specific embodiment, an antibody that immunospecifically binds to a RSV antigen (e.g., RSV F antigen) comprises an amino acid sequence encoded by a nucleotide sequence that hybridizes to the nucleotide sequence(s) encoding palivizumab, AFFF, P12f2, P12f4, P11d4, A1e9, A12a6, A13c4, A17d4, A4B4, A8C7, 1X-493L1FR, H3-3F4, M3H9, Y10H6, DG, AFFF(1), 6H8, L1-7E5, L2-15B10, A13a11, A1H5, A4B4(1), A4B4L1FR-S28R (MEDI-524), A4B4-F52S, A17d4(1), A3e2, A14a4, A16b4, A17b5, A17f5, A17h4, or an antigen-binding fragment thereof under stringent conditions, e.g., hybridization to filter-bound DNA in 6× sodium chloride/sodium citrate (SSC) at about 45° C. followed by one or more washes in 0.2×SSC/0.1% SDS at about 50-65° C., under highly stringent conditions, e.g., hybridization to filter-bound nucleic acid in 6×SSC at about 45° C. followed by one or more washes in 0.1×SSC/0.2% SDS at about 68° C., or under other stringent hybridization conditions which are known to those of skill in the art (see, for example, Ausubel, F. M. et al., eds., 1989, Current Protocols in Molecular Biology, Vol. I, Green Publishing Associates, Inc. and John Wiley & Sons, Inc., New York at pages 6.3.1 -6.3.6 and 2.10.3).

[0222] In another embodiment, an antibody that immunospecifically binds to a RSV antigen (e.g., RSV F antigen) comprises an amino acid sequence that is at least 35%, at least 40%, at least 45%, at least 50%, at least 55%, at least 60%, at least 65%, at least 70%, at least 75%, at least 80%, at least 85%, at least 90%, at least 95%, or at least 99% identical to the amino acid sequence of AFFF, P12f2, P12f4, P11d4, A1e9, A12a6, A13c4, A17d4, A4B4, A8C7, 1X-493L1FR, H3-3F4, M3H9, Y10H6, DG, AFFF(1), 6H8, L1-7E5, L2-15B10, A13a11, A1h5, A4B4(1), A4B4L1FR-S28R (MEDI-524), A4B4-F52S, A17b4(1), A3e2, A14a4, A16b4, A17b5, A17f5, or A17h4, or an antigen-binding fragment thereof. In preferred embodiment, an antibody that immunospecifically binds to a RSV F antigen comprises an amino acid sequence that is at least 35%, at least 40%, at least 45%, at least 50%, at least 55%, at least 60%, at least 65%, at least 70%, at least 75%, at least 80%, at least 85%, at least 90%, at least 95%, or at least 99% identical to an amino acid sequence of A4B4L1FR-S28R (MEDI-524), or an antigen-binding fragment thereof.

[0223] In a specific embodiment, an antibody that immunospecifically binds to a RSV antigen (e.g., RSV F antigen) comprises an amino acid sequence of a VH domain and/or an amino acid sequence a VL domain encoded by a nucleotide sequence that hybridizes to the nucleotide sequence encoding any one of the VH and/or VL domains listed in Table 2 under stringent conditions, e.g., hybridization to filter-bound DNA in 6×sodium chloride/sodium citrate (SSC) at about 45° C. followed by one or more washes in 0.2×SSC/0.1% SDS at about 50-65° C., under highly stringent conditions, e.g., hybridization to filter-bound nucleic acid in 6×SSC at about 45° C. followed by one or more washes in 0.1×SSC/0.2% SDS at about 68° C., or under other stringent hybridization conditions which are known to those of skill in the art (see, for example, Ausubel, F. M. et al., eds., 1989, Current Protocols in Molecular Biology, Vol. 1, Green Publishing Associates, Inc. and John Wiley & Sons, Inc., New York at pages 6.3.1-6.3.6 and 2.10.3). In another embodiment, an antibody that immunospecifically binds to a RSV antigen comprises an amino acid sequence of a VH CDR or an amino acid sequence of a VL CDRs encoded by a nucleotide sequence that hybridizes to the nucleotide sequence encoding any one of the VH CDRs or VL CDRs listed in Table 2 and/or Tables 3A-3F under stringent conditions e.g., hybridization to filter-bound DNA in 6× sodium chloride/sodium citrate (SSC) at about 45° C. followed by one or more washes in 0.2×SSC/0.1% SDS at about 50-65° C., under highly stringent conditions, e.g., hybridization to filter-bound nucleic acid in 6×SSC at about 45° C. followed by one or more washes in 0.1×SSC/0.2% SDS at about 68° C., or under other stringent hybridization conditions which are known to those of skill in the art. In yet another embodiment, an antibody that immunospecifically binds to a RSV antigen (e.g., RSV F antigen) comprises an amino acid sequence of a VH CDR and an amino acid sequence of a VL CDR encoded by nucleotide sequences that hybridizes to the nucleotide sequences encoding any one of the VH CDRs and VL CDRs, respectively, listed in Table 2 and/or Tables 3A-3F under stringent conditions, e.g., hybridization to filter-bound DNA in 6×sodium chloride/sodium citrate (SSC) at about 45° C. followed by one or more washes in 0.2×SSC/0.1% SDS at about 50-65° C., under highly stringent conditions, e.g., hybridization to filter-bound nucleic acid in 6×SSC at about 45° C. followed by one or more washes in 0.1×SSC/0.2% SDS at about 68° C., or under other stringent hybridization conditions which are known to those of skill in the art.

[0224] In another embodiment, an antibody that immunospecifically binds to a RSV antigen (e.g., RSV F antigen) comprises an amino acid sequence of a VH domain that is at least 35%, at least 40%, at least 45%, at least 50%, at least 55%, at least 60%, at least 65%, at least 70%, at least 75%, at least 80%, at least 85%, at least 90%, at least 95%, or at least 99% identical to any one of the VH domains listed in Table 2. In another embodiment, an antibody that immunospecifically binds to a RSV antigen comprises an amino acid sequence of one or more VH CDRs that are at least 35%, at least 40%, at least 45%, at least 50%, at least 55%, at least 60%, at least 65%, at least 70%, at least 75%, at least 80%, at least 85%, at least 90%, at least 95%, or at least 99% identical to any of the VH CDRs listed in Table 2 and/or Tables 3A-3C. In another embodiment, an antibody that immunospecifically binds to a RSV F antigen comprises an amino acid sequence of a VL domain that is at least 35%, at least 40%, at least 45%, at least 50%, at least 55%, at least 60%, at least 65%, at least 70%, at least 75%, at least 80%, at least 85%, at least 90%, at least 95%, or at least 99% identical to any one of the VL domains listed in Table 2. In another embodiment, an antibody that immunospecifically binds to a RSV antigen (e.g., RSV F antigen) comprises an amino acid sequence of one or more VL CDRs that are at least 35%, at least 40%, at least 45%, at least 50%, at least 55%, at least 60%, at least 65%, at least 70%, at least 75%, at least 80%, at least 85%, at least 90%, at least 95%, or at least 99% identical to any of the VL CDRs listed in Table 2 and/or Tables 3D-3F.

[0225] The present invention also encompasses antibodies that compete with an antibody or Fab fragment listed in Table 2 for binding to a RSV antigen (e.g., RSV F antigen). The present invention also encompasses polypeptides, proteins and peptides comprising VL domains and/or VH domains that compete with a polypeptide, protein or peptide comprising a VL domain and/or a VH domain listed in Table 2 for binding to a RSV F antigen. Further, the present invention encompasses polypeptides, proteins and peptides comprising VL CDRs and/or VH CDRs that compete with a polypeptide, protein or peptide comprising a VL CDR and/or VH CDR listed in Table 2 and/or Tables 3A-3F for binding to a RSV F antigen.

[0226] The antibodies of the invention include derivatives that are chemically modified, i.e., by the covalent attachment of any type of molecule to the antibody. For example, but not by way of limitation, the antibody derivatives include antibodies that have been chemically modified, e.g., by glycosylation, acetylation, pegylation, phosphorylation, amidation, derivatization by known protecting/blocking groups, proteolytic cleavage, linkage to a cellular ligand or other protein, etc. Any of numerous chemical modifications may be carried out by known techniques, including, but not limited to specific chemical cleavage, acetylation, formylation, metabolic synthesis of tunicamycin, etc. Additionally, the derivative may contain one or more non-classical amino acids.

[0227] The present invention also provides antibodies that immunospecifically bind to a RSV antigen (e.g., RSV F antigen) which comprise a framework region known to those of skill in the art (e.g., a human or non-human fragment). The framework region may be naturally occurring or consensus framework regions. Preferably, the framework region of an antibody of the invention is human (see, e.g., Chothia et al., 1998, J. Mol. Biol. 278:457-479 for a listing of human framework regions, which is incorporated by reference herein in its entirety). In a specific embodiment, an antibody of the invention comprises the framework region of A4B4L1FR-S28R (MEDI-524).

[0228] In a specific embodiment, the present invention provides for antibodies that immunospecifically bind to a RSV F antigen, said antibodies comprising the amino acid sequence of one or more of the CDRs of an antibody listed in Table 2 (i.e., AFFF, P12f2, P12f4, P11d4, A1e9, A12a6, A13c4, A17d4, A4B4, A8C7, 1X-493L1FR, H3-3F4, M3H9, Y10H6, DG, AFFF(1), 6H8, L1-7E5, L2-15B10, A13a11, A1h5, A4B4(1), A4B4L1FR-S28R (MEDI-524), A4B4-F52S, A17d4(1), A3e2, A14a4, A16b4, A17b5, A17f5, or A17h4) and/or one or more of the CDRs in Table 3A-3F, and human framework regions with one or more amino acid substitutions at one, two, three or more of the following residues: (a) rare framework residues that differ between the murine antibody framework (i.e., donor antibody framework) and the human antibody framework (i.e., acceptor antibody framework); (b) Venier zone residues when differing between donor antibody framework and acceptor antibody framework; (c) interchain packing residues at the VH/VL interface that differ between the donor antibody framework and the acceptor antibody framework; (d) canonical residues which differ between the donor antibody framework and the acceptor antibody framework sequences, particularly the framework regions crucial for the definition of the canonical class of the murine antibody CDR loops; (e) residues that are adjacent to a CDR; (g) residues capable of interacting with the antigen; (h) residues capable of interacting with the CDR; and (i) contact residues between the VH domain and the VL domain. In certain embodiments, the above-referenced antibodies comprise a modified IgG (e.g., IgG1) constant domain, or FcRn binding fragment thereof (e.g., the Fc domain or hinge-Fc domain), described herein, and preferably the modified IgG constant domain comprises the YTE modification (e.g., MEDI-524-YTE).

[0229] The present invention encompasses antibodies that immunospecifically bind to a RSV F antigen, said antibodies comprising the amino acid sequence of the VH domain and/or VL domain or an antigen-binding fragment thereof of AFFF, P12f2, P12f4, P11d4, A1e9, A12a6, A13c4, A17d4, A4B4, A8C7, 1X-493L1FR, H3-3F4, M3H9, Y10H6, DG, AFFF(1), 6H8, L1-7E5, L2-15B10, A13a11, A1h5, A4B4(1), A4B4L1FR-S28R (MEDI-524), A4B4-F52S, A17d4(1), A3e2, A14a4, A16b4, A17b5, A17f5, or A17h4 with mutations (e.g., one or more amino acid substitutions) in the framework regions. In certain embodiments, antibodies that immunospecifically bind to a RSV antigen comprise the amino acid sequence of the VH domain and/or VL domain or an antigen-binding fragment thereof of AFFF, P12f2, P12f4, P11d4, A1e9, A12a6, A13c4, A17d4, A4B4, A8C7, 1X-493L1FR, H3-3F4, M3H9, Y10H6, DG, AFFF(1), 6H8, L1-7E5, L2-15B10, A13a11, A1h5, A4B4(1), A4B4L1FR-S28R (MEDI-524), A4B4-F52S, A17d4(1), A3e2, A14a4, A16b4, A17b5, A17f5, or A17h4 with one or more amino acid residue substitutions in the framework regions of the VH and/or VL domains. In certain embodiments, the above-referenced antibodies comprise a modified IgG (e.g., IgG1) constant domain, or FcRn binding fragment thereof (e.g., the Fc domain or hinge-Fc domain), described herein, and preferably the modified IgG constant domain comprises the YTE modification (e.g., MEDI-524-YTE).

[0230] The present invention also encompasses antibodies which immunospecifically bind to one or more RSV antigens (e.g., RSV F antigens), said antibodies comprising the amino acid sequence of A4B4L1FR-S28R (MEDI-524) with mutations (e.g., one or more amino acid substitutions) in the framework regions. In certain embodiments, antibodies which immunospecifically bind to one or more RSV F antigens comprise the amino acid sequence of A4B4L1FR-S28R (MEDI-524) with one or more amino acid residue substitutions in the framework regions of the VH and/or VL domains and one or more modifications in the constant domain, or FcRn-binding fragment thereof (preferably the Fc domain or hinge-Fdc domain). In a specific embodiment, modified antibodies which immunospecifically bind to one or more RSV F antigens comprise the framework regions depicted in FIG. 2 or FIG. 13. In certain embodiments, the above-referenced antibodies comprise a modified IgG (e.g., IgG1) constant domain, or FcRn binding fragment thereof (e.g., the Fc domain or hinge-Fc domain), described herein, and preferably the modified IgG constant domain comprises the YTE modification (e.g., MEDI-524-YTE).

[0231] The present invention also encompasses antibodies that immunospecifically bind to a RSV antigen, said antibodies comprising the amino acid sequence of the VH domain and/or VL domain of an antibody in Table 2 (i. e., AFFF, P12f2, P12f4, P11d4, A1e9, A12a6, A13c4, A17d4, A4B4, A8C7, 1X-493L1FR, H3-3F4, M3H9, Y10H6, DG, AFFF(1), 6H8, L1-7E5, L2-15B10, A13a11, A1h5, A4B4(1), A4B4L1FR-S28R (MEDI-524), A4B4-F52S, A17d4(1), A3e2, A14a4, A16b4, A17b5, A17f5, or A17h4) with mutations (e.g., one or more amino acid residue substitutions) in the hypervariable and framework regions. Preferably, the amino acid substitutions in the hypervariable and framework regions improve binding of the antibody to a RSV antigen. In certain embodiments, the above-referenced antibodies comprise a modified IgG (e.g., IgG1) constant domain, or FcRn binding fragment thereof (e.g., the Fc domain or hinge-Fc domain), described herein, and preferably the modified IgG constant domain comprises the YTE modification (e.g., MEDI-524-YTE).

[0232] The present invention also encompasses antibodies which immunospecifically bind to one or more RSV F antigens, said antibodies comprising the amino acid sequence of A4B4L1FR-S28R (MEDI-524) with mutations (e.g., one or more amino acid residue substitutions) in the variable and framework regions. In certain embodiments, the above-referenced antibodies comprise a modified IgG (e.g., IgG1) constant domain, or FcRn binding fragment thereof (e.g., the Fc domain or hinge-Fc domain), described herein, and preferably the modified IgG constant domain comprises the YTE modification (e.g., MEDI-524-YTE).

[0233] The present invention also provides antibodies of the invention that immunospecifically bind to a RSV antigen (e.g., RSV F antigen) which comprise constant regions known to those of skill in the art (e.g., the C-gamma-1 (G1m) constant domain described in Johnson et al. (1997), J. Infect. Dis. 176:1215-1224 and U.S. Pat. No. 5,824,307). Preferably, the constant regions of a modified or unmodified antibody of the invention provided herein are human. In a specific embodiment, an antibody of the invention comprises the constant regions of A4B4L1FR-S28R (MEDI-524). In other embodiments, the modified antibodies of the invention comprise a modified IgG constant domain, or FcRn-binding fragment thereof (preferably, Fc domain or hinge-Fc domain). In certain embodiments, the modified antibodies of the invention comprise a modified IgG, such as a modified IgG1, constant domain, or FcRn binding fragment thereof. In a preferred embodiment, the above-referenced modified antibodies comprise a modified IgG, such as a modified IgG1, constant domain, or FcRn binding fragment thereof, comprising YTE.

[0234] The present invention also provides for fusion proteins comprising an antibody provided herein that immunospecifically binds to a RSV antigen and a heterologous polypeptide. Preferably, the heterologous polypeptide that the antibody are fused to is useful for targeting the antibody to respiratory epithelial cells.

[0235] The present invention also provides for panels of antibodies that immunospecifically bind to a RSV antigen. In specific embodiments, the invention provides for panels of antibodies having different association rate constants different dissociation rate constants, different affinities for a RSV antigen, and/or different specificities for a RSV antigen. The invention provides panels of about 10, preferably about 25, about 50, about 75, about 100, about 125, about 150, about 175, about 200, about 250, about 300, about 350, about 400, about 450, about 500, about 550, about 600, about 650, about 700, about 750, about 800, about 850, about 900, about 950, or about 1000 antibodies or more. Panels of antibodies can be used, for example, in 96 well plates for assays such as ELISAs. In certain embodiments, the above-referenced antibodies comprise a modified IgG (e.g., IgG1) constant domain, or FcRn binding fragment thereof (e.g., the Fc domain or hinge-Fc domain), described herein, and preferably the modified IgG constant domain comprises the YTE modification (e.g., MEDI-524-YTE).

### 5.1.1 Modifications of Antibodies to Increase Half-Lives

[0236] The present invention provides for modified antibodies that immunospecifically bind to a RSV antigen which have an extended (or increased) half-life in vivo. In particular, the present invention provides modified antibodies that immunospecifically bind to a RSV antigen which have a half-life in a subject, preferably a mammal and most preferably a human, of from about 3 days to about 180 days (or more), and in some embodiments greater than 3 days, greater than 7 days, greater than 10 days, greater than 15 days, greater than 20 days, greater than 25 days, greater than 30 days, greater than 35 days, greater than 40 days, greater than 45 days, greater than 50 days, at least about 60 days, greater than 75 days, greater than 90 days, greater than 105 days, greater than 120 days, greater than 135 days, greater than 150 days, greater than 165 days, or greater than 180 days. In preferred embodiments, the modified antibodies comprise a modified IgG constant domain, or FcRn-binding fragment thereof (preferably, Fc domain or hinge-Fc domain), resulting in an extended in vivo half-life. In preferred embodiments, the modified antibodies comprise a modified IgG, such as a modified IgG1, constant domain, or FcRn binding fragment thereof, comprising YTE. In some embodiments, the modified antibody is MEDI-524-YTE.

[0237] In certain embodiments, the in vivo half-life of the modified antibody is increased as compared to as compared to the same antibody that does not comprise one or more modifications in the IgG constant domain, or FcRn-binding fragment thereof, as determined using methods described herein or known in the art (see Example 6.17). In some embodiments, the half-life of the modified antibody is increased by about 2-fold, about 3-fold, about 4-fold, about 5-fold, about 6-fold, about 7-fold, about 8-fold, about 9-fold, about 10-fold, about 20-fold or more as compared to the same antibody that does not comprise one or more modifications in the IgG constant domain, or FcRn-binding fragment thereof. In certain embodiments, the half-life of the modified antibody is increased by 1 day, 2 days, 3 days, 4 days, 5 days, 6 days, 7 days, 8 days, 9 days, 10 days, 11 days, 12 days, 13 days, 14 days, 15 days, 16 days, 17 days, 18 days, 19 days, 20 days, 25 days, 30 days or more as compared to the same antibody that does not comprise one or more modifications in the IgG constant domain, or FcRn-binding fragment thereof.

[0238] In a specific embodiment, modified antibodies having an increased half-life in vivo are be generated by introducing one or more amino acid modifications (i.e., substitutions, insertions or deletions) into an IgG constant domain, or FcRn-binding fragment thereof (preferably a Fc or hinge-Fc domain fragment). See, e.g., International Publication Nos. WO 02/060919; WO 98/23289; and WO 97/34631; and U.S. Pat. No. 6,277,375; each of which is incorporated herein by reference in its entirety. In a preferred embodiment, the modified antibodies have one or more amino acid modifications in the second constant CH2 domain (residues 231-340 of human IgG1) (e.g., SEQ ID NO:339) and/or the third constant CH3 domain (residues 341-447 of human IgG1) (e.g., SEQ ID NO:340), with numbering according to the EU Index as in Kabat, supra. (See, e.g., FIG. 20B).

[0239] The present invention provides amino acid residues and/or modifications in particular portions of the constant domain (e.g., of an IgG molecule) that interact with the FcRn, which modifications increase the affinity of the IgG, or fragment thereof, for the FcRn. Accordingly, the invention provides molecules, preferably proteins, more preferably immunoglobulins (including any antibody disclosed in Section 5.1 or elsewhere in this application), that comprise an IgG (e.g., IgG1) constant domain, or FcRn-binding fragment thereof (preferably a Fc or hinge-Fc domain fragment), having one or more amino acid modifications (i.e., substitutions, insertions, deletions, and/or naturally occurring residues) in one or more regions that interact with the FcRn, which modifications increase the affinity of the IgG or fragment thereof, for the FcRn, and also increase the in vivo half-life of the molecule. In certain embodiments, the one or more amino acid modifications are made in one or more of residues 251-256, 285-290, 308-314, 385-389, and 428-436 of the IgG hinge-Fc region (for example, as in the human IgG1 hinge-Fc region depicted in FIG. 20B, FIG. 22, or SEQ ID NO:342), or analogous residues thereof, as determined by amino acid sequence alignment, in other IgG hinge-Fc regions. Numbering of residues are according to the EU index in Kabat et al. (1991). Sequences of proteins of immunological interest. (U.S. Department of Health and Human Services, Washington, D.C.) 5^{th} ed. (“Kabat et al.”). An exemplary human IgG1 constant domain hinge-Fc region is depicted in FIG. 20B with numbering according to the EU Index as in Kabat et al., supra. Due to natural variations in IgG constant domain sequences (see, e.g., Kabat et al., supra), in certain instances, a first amino acid residue may be substituted with a second amino acid residue at a given position (for example, in the sequence shown in FIG. 20B, the Met at position 252 may be substituted with a Tyr) or, alternatively, the second residue may be already present in antibody at the given position, in which case substitution is not necessary (for example, the Met at position 252 remains a Met). Antibody modifications are described in co-owned and co-pending U.S. Ser. No. 10/020,354 which is incorporated herein by reference in its entirety.

[0240] In a preferred embodiment, the amino acid modifications are made in a human IgG constant domain such as a human IgG1 constant domain (e.g., those described in Kabat et al., supra), or FcRn-binding fragment thereof (preferably, Fc domain or hinge-Fc domain). In a certain embodiment, the modifications are not made at residues 252, 254, or 256 (i.e., all are made at one or more of residues 251, 253, 255, 285-290, 308-314, 385-389, or 428-436) of the IgG constant domain. In one embodiment, the amino acid modifications are not the substitution with leucine at residue 252, with serine at 254, and/or with phenylalanine at position 256. In particular, in certain embodiments, such modifications are not made when the IgG constant domain, hinge-Fc domain, hinge-Fc domain or other FcRn-binding fragment thereof is derived from a mouse.

[0241] The amino acid modifications may be any modification, for example, at one or more of residues 251-256, 285-290, 308-314, 385-389, and 428-436 (see, e.g., FIG. 20B), that increases the in vivo half-life of the IgG constant domain, or FcRn-binding fragment thereof (e.g., Fc or hinge-Fc domain), and any molecule attached thereto, and increases the affinity of the IgG, or fragment thereof, for FcRn. In some embodiments, the modified antibodies comprise one or more amino acid substitutions, naturally occurring amino acids, or combinations thereof, at the indicated amino acid positions. Preferably, the one or more modifications also result in a higher binding affinity of the constant domain, or FcRn-binding fragment thereof, for FcRn at pH 6.0 than at pH 7.4. In other embodiments, the modifications alter (i.e., increase or decrease) bioavailability of the molecule, in particular, alters (i.e., increases or decreases) transport (or concentration or half-life) of the molecule to mucosal surfaces (e.g., of the lungs) or other portions of a target tissue. In a preferred embodiment, the amino acid modifications alter (preferably, increase) transport or concentration or half-life of the molecule to the lungs. In other embodiments, the amino acid modifications alter (preferably, increase) transport (or concentration or half-life) of the molecule to the heart, pancreas, liver, kidney, bladder, stomach, large or small intestine, respiratory tract, lymph nodes, nervous tissue (central and/or peripheral nervous tissue), muscle, epidermis, bone, cartilage, joints, blood vessels, bone marrow, prostate, ovary, uterine, tumor or cancer tissue, etc. In a preferred embodiment, the amino acid modifications do not abolish, or, more preferably, do not alter, other immune effector or receptor binding functions of the constant domain, for example, but not limited to complement fixation, ADCC and binding to FcyRI, FcyRII, and FcyRIII, as can be determined by methods well-known and routine in the art. In another preferred embodiment, the modified FcRn-binding fragment of the constant domain does not contain sequences that mediate immune effector functions or other receptor binding. Such fragments may be particularly useful for conjugation to a non-IgG or non-immunoglobulin molecule to increase the in vivo half-life thereof. In yet another embodiment, the effector functions are selectively altered (e.g., to reduce or increase effector functions).

[0242] In certain embodiments, the IgG constant domain comprises a modification at one or more of residues 308, 309, 311, 312 and 314. In some embodiments, a modified antibody comprises a threonine at position 308, proline at position 309, serine at position 311, aspartic acid at position 312, and/or leucine at position 314. In other embodiments, a modified antibody comprises an isoleucine at position 308, proline at position 309, and/or a glutamic acid at position 311. In yet another embodiment, a modified antibody comprises a threonine at position 308, a proline at position 309, a leucine at position 311, an alanine at position 312, and/or an alanine at position 314. Accordingly, in certain embodiments a modified antibody comprises a constant domain, wherein the residue at position 308 is a threonine or isoleucine, the residue at position 309 is proline, the residue at position 311 is serine, glutamic acid or leucine, the residue at position 312 is alanine, and/or the residue at position 314 is leucine or alanine. In one embodiment, a modified antibody comprises threonine at position 308, proline at position 309, serine at position 311, aspartic acid at position 312, and/or leucine at position 314.

[0243] In some embodiments, a modified antibody comprises a constant domain, wherein one or more of residues 251, 252, 254, 255, and 256 is modified. In specific embodiments, residue 251 is leucine or arginine, residue 252 is tyrosine, phenylalanine, serine, tryptophan or threonine, residue 254 is threonine or serine, residue 255 is arginine, leucine, glycine, or isoleucine, and/or residue 256 is serine, arginine, glutamine, glutamic acid, aspartic acid, alanine, asparagine or threonine. In a more specific embodiment, residue 251 is leucine, residue 252 is tyrosine, residue 254 is threonine or serine, residue 255 is arginine, and/or residue 256 is glutamic acid. In certain embodiments, the residue at position 252 is a tyrosine, the residue at position 254 is a threonine, or the residue at position 256 is a glutamic acid. In preferred embodiments, modified IgG, such as a modified IgG1, constant domain, or FcRn binding fragment thereof, comprises the YTE modification, i.e., the residue at position 252 is a tyrosine (Y), the residue at position 254 is a threonine (T), and the residue at position 256 is a glutamic acid (E). In preferred embodiments, the modified antibody is MEDI-524-YTE.

[0244] In specific embodiments, the amino acid modifications are substitutions at one or more of residues 428, 433, 434, and 436. In some embodiments, residue 428 is threonine, methionine, leucine, phenylalanine, or serine, residue 433 is lysine, arginine, serine, isoleucine, proline, glutamine or histidine, residue 434 is phenylalanine, tyrosine, or histidine, and/or residue 36 is histidine, asparagine, arginine, threonine, lysine, or methionine. In a more specific embodiment, residues at position 428 and/or 434 are substituted with methionine, and/or histidine respectively.

[0245] In other embodiments, the amino acid sequence comprises modifications at one or more of residues 385, 386, 387, and 389. In specific embodiments, residue 385 is arginine, aspartic acid, serine, threonine, histidine, lysine, alanine or glycine, residue 386 is threonine, proline, aspartic acid, serine, lysine, arginine, isoleucine, or methionine, residue 387 is arginine, proline, histidine, serine, threonine, or alanine, and/or residue 389 is proline, serine or asparagine. In more specific embodiments, one or more of positions 385, 386, 387, and 389 are arginine, threonine, arginine, and proline, respectively. In yet another specific embodiment, one or more of positions 385, 386, and 389 are aspartic acid, proline, and serine, respectively.

[0246] In some embodiments, amino acid modifications are made at one or a combination of residues 251, 252, 254, 255, 256, 308, 309, 311, 312, 314, 385, 386, 387, 389, 428, 433, 434, and/or 436, particularly where the modifications are amino acid residues described immediately above for these residues.

[0247] In some embodiments, the molecule of the invention contains a Fc region, or FcRn-binding fragment thereof, having one or more of the following: leucine at residue 251, tyrosine at residue 252, threonine or serine at residue 254, arginine at residue 255, threonine at residue 308, proline at residue 309, serine at residue 311, aspartic acid at residue 312, leucine at residue 314, arginine at residue 385, threonine at residue 386, arginine at residue 387, proline at residue 389, methionine at residue 428, and/or tyrosine at residue 434.

[0248] In certain embodiments, the FcRn-binding fragment has a modification at 1, 2, 3, 4, 5, 6, 7, 8, 9, 10, 11, 12, 13, 14, 15, 16, 17, or all 18 of residues 251, 252, 254, 255, 256, 308, 309, 311, 312, 314, 385, 386, 387, 389, 428, 433, 434, and/or 436.

[0249] Due to natural variations in IgG constant domain sequences (see, e.g., Kabat et al., supra), in certain instances, a first amino acid residue may be substituted (or otherwise modified) with a second amino acid residue at a given position (for example, in the sequence shown in FIG. 20B, the Met at position 252 may be substituted with a Tyr) or, alternatively, the second residue may be already present in antibody at the given position, in which case substitution is not necessary (for example, the Met at position 252 remains a Met). Amino acid modifications can be made by any method known in the art and many such methods are well known and routine for the skilled artisan. For example, but not by way of limitation, amino acid substitutions, deletions and insertions may be accomplished using any well-known PCR-based technique. Amino acid substitutions may be made by site-directed mutagenesis (see, for example, Zoller and Smith, Nucl. Acids Res. 10:6487-6500, 1982; Kunkel, Proc. Natl. Acad. Sci USA 82:488, 1985, which are hereby incorporated by reference in their entireties). Mutants that result in increased affinity for FcRn and increased in vivo half-life may readily be screened using well-known and routine assays, such as those described in Sections 5.5 and 5.6, infra. In a preferred method, amino acid substitutions are introduced at one or more residues in the IgG constant domain or FcRn-binding fragment thereof and the mutated constant domains or fragments are expressed on the surface of bacteriophage which are then screened for increased FcRn binding affinity (see, in particular, Sections 5.5 and 5.6, infra).

[0250] Preferably, the modified amino acid residues are surface exposed residues. Additionally, in making amino acid substitutions, preferably the amino acid residue to be substituted is a conservative amino acid substitution, for example, a polar residue is substituted with a polar residue, a hydrophilic residue with a hydrophilic residue, hydrophobic residue with a hydrophobic residue, a positively charged residue with a positively charged residue, or a negatively charged residue with a negatively charged residue. Moreover, preferably, the modified amino acid residue is not highly or completely conserved across species and/or is critical to maintain the constant domain tertiary structure or to FcRn binding. For example, but not by way of limitation, modification of the histidine at residue 310 is not preferred.

[0251] Specific mutants of the Fc domain that have increased affinity for FcRn were isolated after the third-round panning (as described in Section 6.17) from a library of mutant human IgG1 molecules having mutations at residues 308-314 (histidine at position 310 and tryptophan at position 313 are fixed), those isolated after the fifth-round panning of the library for residues 251-256 (isoleucine at position 253 is fixed), those isolated after fourth-round panning of the library for residues 428-436 (histidine at position 429, glutamic acid at position 430, alanine at position 431, leucine at position 432, and histidine at position 435 are fixed), and those isolated after sixth-round panning of the library for residues 385-389 (glutamic acid at position 388 is fixed) are listed in Table 33, infra. The wild type human IgG1 has a sequence Val-Leu-His-Gln-Asp-Trp-Leu (SEQ ID NO:344) at positions 308-314, Leu-Met-Ile-Ser-Arg-Thr (SEQ ID NO:345) at positions 251-256, Met-His-Glu-Ala-Leu-His-Asn-His-Tyr (SEQ ID NO:346) at positions 428-436, and Gly-Gln-Pro-Glu-Asn (SEQ ID NO:347) at positions 386-389.

[0252] In some embodiments, an antibody of the invention contains a Fc region, or FcRn-binding fragment thereof, having one or more particular amino acid residues among the amino acid residues at positions 251-256 of the Fc region selected from the group consisting of the following residues: residue 252 is tyrosine, phenylalanine, serine, tryptophan or threonine; residue 254 is threonine; residue 255 is arginine, leucine, glycine, or isoleucine; and residue 256 is serine, arginine, glutamine, glutamic acid, aspartic acid, or threonine. In a particular embodiment, at least one amino acid modification is selected from the group consisting of the following: residue 251 is leucine, residue 252 is tyrosine, residue 254 is threonine, residue 255 is arginine, and residue 256 is glutamic acid. In certain embodiments, residue 252 is not leucine, alanine, or valine; residue 253 is not alanine; residue 254 is not serine or alanine; residue 255 is not alanine; and/or residue 256 is not alanine, histidine, phenylalanine, glycine, or asparagine.

[0253] In another embodiment, a modified antibody of the invention contains a Fc region, or FcRn-binding fragment thereof, having one or more particular amino acid residues among the amino acid residues at positions 285-290 of the Fc region. In particular embodiments, residue 285 is not alanine; residue 286 is not alanine, glutamine, serine, or aspartic acid; residue 288 is not alanine; residue 289 is not alanine; and/or residue 290 is not alanine, glutamine, serine, glutamic acid, arginine, or glycine.

[0254] In some embodiments, a modified antibody of the invention contains a Fc region, or FcRn-binding fragment thereof, having one or more particular amino acid residues among the amino acid residues at positions 308-314 of the Fc region selected from the group consisting of the following residues: a threonine at position 308, a proline at position 309, a serine at position 311, and an aspartic acid at position 312. In another embodiment, an antibody of the invention comprises one or more specific modifications selected from the group consisting of an isoleucine at position 308, a proline at position 309, and a glutamic acid at position 311. In another embodiment, a modified antibody comprises one or more specific amino acid residues selected from the group consisting of a threonine at position 308, a proline at position 309, and a leucine at position 311. In certain embodiments, position 309 is not an alanine; position 310 is not an alanine; position 311 is not an alanine or an asparagine; position 312 is not an alanine; and/or position 314 is not an arginine.

[0255] Accordingly, in certain embodiments a modified antibody comprises a constant domain having one or more particular amino acid residues in the Fc region selected from the group consisting of the following residues: the residue at position 308 is threonine or isoleucine; the residue at position 309 is proline; the residue at position 311 is serine, glutamic acid or leucine; the residue at position 312 is aspartic acid; and the residue at position 314 is leucine or alanine. In an embodiment, the modified antibody comprises a constant domain having one or more particular amino acid residues in the Fc region selected from the group consisting of the following residues: threonine at position 308, proline at position 309, serine at position 311, aspartic acid at position 312, and leucine at position 314.

[0256] In some embodiments, an antibody of the invention contains a Fc region, or FcRn-binding fragment thereof, having one or more particular amino acid residues among the amino acid residues at positions 385-389 of the Fc region selected from the group consisting of the following residues: residue 385 is arginine, aspartic acid, serine, threonine, histidine, lysine, alanine or glycine; residue 386 is threonine, proline, aspartic acid, serine, lysine, arginine, isoleucine, or methionine; residue 387 is arginine, proline, histidine, serine, threonine, or alanine; and residue 389 is proline, serine or asparagine. In particular embodiments, one or more of the amino acid residue at positions 385, 386, 387, and 389 is arginine, threonine, arginine, and proline, respectively. In another specific embodiment, one or more of the amino acid residues at positions 385, 386, and 389 is aspartic acid, proline, and serine, respectively. In particular embodiments, the amino acid at any one of positions 386, 388, and 389 is not an alanine.

[0257] In some embodiments, the amino acid modifications are at one or more of residues 428-436. In specific embodiments, residue 428 is threonine, methionine, leucine, phenylalanine, or serine, residue 433 is arginine, serine, isoleucine, proline, glutamine or histidine, residue 434 is phenylalanine, tyrosine, or histidine, and/or residue 436 is histidine, asparagine, arginine, threonine, lysine, or methionine. In a more specific embodiment, residues at position 428 and/or 434 are substituted with methionine, and/or histidine respectively. In some embodiments, the amino acid residue at position 430 is not alanine; the amino acid residue at position 433 is not alanine or lysine; the amino acid at position 434 is not alanine or glutamine; the amino acid at position 435 is not alanine, arginine, or tyrosine; and/or the amino acid at position 436 is not alanine or tyrosine.

[0258] In another embodiment, an antibody of the invention contains a Fc region, or FcRn-binding fragment thereof, having one or more particular amino acid residues in the Fc region selected from the group consisting of a leucine at residue 251, a tyrosine at residue 252, a threonine at residue 254, an arginine at residue 255, a threonine at residue 308, a proline at residue 309, a serine at residue 311, an aspartic acid at residue 312, a leucine at residue 314, an arginine at residue 385, a threonine at residue 386, an arginine at residue 387, a proline at residue 389, a methionine at residue 428, and a tyrosine at residue 434.

[0259] In one embodiment, the invention provides modified immunoglobulin molecules that have increased in vivo half-life and affinity for FcRn relative to unmodified molecules (and, in some embodiments, altered bioavailability such as increased or decreased transport to mucosal surfaces or other target tissues). Such immunoglobulin molecules include IgG molecules that naturally contain an FcRn-binding fragment and other non-IgG immunoglobulins (e.g., IgE, IgM, IgD, IgA and IgY) or fragments of immunoglobulins that have been engineered to contain an FcRn-binding fragment (i.e., fusion proteins comprising non-IgG immunoglobulin or a portion thereof and an FcRn-binding fragment). In both cases the FcRn-binding fragment has one or more amino acid modifications that increase the affinity of the constant domain fragment for FcRn, such as those provided above.

[0260] The modified immunoglobulins include any immunoglobulin molecule that binds (preferably, immunospecifically, i.e., competes off non-specific binding), as determined by immunoassays well known in the art and described herein for assaying specific antigen-antibody binding an antigen and contains an FcRn-binding fragment. Such antibodies include, but are not limited to, polyclonal, monoclonal, bi-specific, multi-specific, human, humanized, and chimeric antibodies, single chain antibodies, Fab fragments, F(ab′)₂ fragments, disulfide-linked Fvs, and fragments containing either a VL or VH domain or even a CDR that specifically binds an antigen, that, in certain cases, are engineered to contain or to be fused to an FcRn-binding fragment.

[0261] The IgG molecules of the invention, and FcRn-binding fragments thereof, are preferably IgG1 subclass of IgGs, but may also be any other IgG subclasses of given animals. For example, in humans, the IgG class includes IgG1, IgG2, IgG3, and IgG4; and mouse IgG includes IgG1, IgG2a, IgG2b, IgG2c and IgG3. It is known that certain IgG subclasses, for example, mouse IgG2b and IgG2c, have higher clearance rates than, for example, IgG1 (Medesan et al., Eur. J. Immunol., 28:2092-2100, 1998). Thus, when using IgG subclasses other than IgG1, it may be advantageous to substitute one or more of the residues, particularly in the CH2 and CH3 domains, that differ from the IgG1 sequence with those of IgG1, thereby increasing the in vivo half-life of the other types of IgG.

[0262] The immunoglobulins (and other proteins used herein) may be from any animal origin including birds and mammals. Preferably, the antibodies are human, rodent (e.g., mouse and rat), donkey, sheep, rabbit, goat, guinea pig, camel, horse, or chicken. As used herein, “human” antibodies include antibodies having the amino acid sequence of a human immunoglobulin and include antibodies isolated from human immunoglobulin libraries or from animals transgenic for one or more human immunoglobulin and that do not express endogenous immunoglobulins, as described infra and, for example, in U.S. Pat. No. 5,939,598 by Kucherlapati et al.

[0263] Modification of any of the antibodies of the invention (e.g., those with increased affinity and/or avidity for a RSV antigen) and/or other therapeutic antibodies to increase the in vivo half-life permits administration of lower effective dosages and/or less frequent dosing of the therapeutic antibody. Such modification to increase in vivo half-life can also be useful to improve diagnostic immunoglobulins as well, for example, permitting administration of lower doses to achieve sufficient diagnostic sensitivity.

[0264] In some embodiments, to prolong the in vivo serum circulation of antibodies of the invention, inert polymer molecules such as high molecular weight polyethyleneglycol (PEG) are attached to the antibodies with or without a multifunctional linker either through site-specific conjugation of the PEG to the N— or C-terminus of the antibodies or via epsilon-amino groups present on lysine residues. Linear or branched polymer derivatization that results in minimal loss of biological activity will be used. The degree of conjugation can be closely monitored by SDS-PAGE and mass spectrometry to ensure proper conjugation of PEG molecules to the antibodies. Unreacted PEG can be separated from antibody-PEG conjugates by size-exclusion or by ion-exchange chromatography. PEG-derivatized antibodies can be tested for binding activity as well as for in vivo efficacy using methods well-known to those of skill in the art, for example, by immunoassays described herein.

[0265] In another embodiment, antibodies of the invention are conjugated to albumin in order to make the antibody more stable in vivo or have a longer half-life in vivo. The techniques are well-known in the art, see, e.g., International Publication Nos. WO 93/15199, WO 93/15200, and WO 01/77137; and European Patent No. EP 413,622, all of which are incorporated herein by reference.

[0266] One or more modifications in amino acid residues 251-256, 285-290, 308-314, 385-389, and 428-436 of the constant domain may be introduced utilizing any technique known to those of skill in the art. The constant domain or fragment thereof having one or more modifications in amino acid residues 251-256, 285-290, 308-314, 385-389, and 428-436 may be screened by, for example, a binding assay to identify the constant domain or fragment thereof with increased affinity for the FcRn receptor (e.g., as described in Sections 5.5 and 5.6, infra). Those modifications in the hinge-Fc domain or the fragments thereof which increase the affinity of the constant domain or fragment thereof for the FcRn receptor can be introduced into antibodies to increase the in vivo half-lives of said antibodies. Further, those modifications in the constant domain or the fragment thereof which increase the affinity of the constant domain or fragment thereof for the FcRn can be fused to bioactive molecules to increase the in vivo half-lives of said bioactive molecules (and, preferably alter (increase or decrease) the bioavailability of the molecule, for example, to increase or decrease transport to mucosal surfaces (or other target tissue) (e.g., the lungs).

### 5.1.2 Antibody Conjugates and Fusion Proteins

[0267] In some embodiments, antibodies of the invention are conjugated or recombinantly fused to a diagnostic, detectable or therapeutic agent or any other molecule. When in vivo half-life is desired to be increased, said antibodies can be modified antibodies. The conjugated or recombinantly fused antibodies can be useful, e.g., for monitoring or prognosing the onset, development, progression and/or severity of a RSV URI and/or LRI or otitis media as part of a clinical testing procedure, such as determining the efficacy of a particular therapy. Such diagnosis and detection can accomplished by coupling the antibody to detectable substances including, but not limited to, various enzymes, such as, but not limited to, horseradish peroxidase, alkaline phosphatase, beta-galactosidase, or acetylcholinesterase; prosthetic groups, such as, but not limited to, streptavidin/biotin and avidin/biotin; fluorescent materials, such as, but not limited to, umbelliferone, fluorescein, fluorescein isothiocynate, rhodamine, dichlorotriazinylamine fluorescein, dansyl chloride or phycoerythrin; luminescent materials, such as, but not limited to, luminol; bioluminescent materials, such as but not limited to, luciferase, luciferin, and aequorin; radioactive materials, such as, but not limited to, iodine (¹³¹I, ¹²⁵I, ¹²³I, and ¹²¹I,), carbon (¹⁴C), sulfur (³⁵S), tritium (³H), indium (¹¹⁵In, ¹¹³In, ¹¹²In, and ¹¹¹In,), technetium (⁹⁹Tc), thallium (²⁰¹Ti), gallium (⁶⁸Ga, ⁶⁷Ga), palladium (¹⁰³Pd), molybdenum (⁹⁹Mo), xenon (¹³³Xe), fluorine (¹⁸F), ¹⁵³Sm, ¹⁷⁷Lu, ¹⁵⁹Gd, ¹⁴⁰Pm, ¹⁴⁰La, ¹⁷⁵Yb, ¹⁶⁶Ho, ⁹⁰Y, ⁴⁷Sc, ¹⁸⁶Re, ⁸⁸Re, ¹⁴²Pr, ¹⁰⁵Rh, ⁹⁷Ru, ⁶⁸Ge, ⁵⁷Co, ⁶⁵Zn, ⁸⁵Sr, ³²P, ¹⁵³Gd, ¹⁶⁹Yb, ⁵¹Cr, ⁵⁴Mn, ⁷⁵Se, ¹¹³Sn, and ¹¹⁷Sn; and position emitting metals using various positron emission tomographies, and non-radioactive paramagnetic metal ions.

[0268] The present invention further encompasses uses of the antibodies of the invention conjugated or recombinantly fused to a therapeutic moiety (or one or more therapeutic moieties). The antibody may be conjugated or recombinantly fused to a therapeutic moiety, such as a cytotoxin, e.g., a cytostatic or cytocidal agent, a therapeutic agent or a radioactive metal ion, e.g., alpha-emitters. A cytotoxin or cytotoxic agent includes any agent that is detrimental to cells. Therapeutic moieties include, but are not limited to, antimetabolites (e.g., methotrexate, 6-mercaptopurine, 6-thioguanine, cytarabine, 5-fluorouracil decarbazine); alkylating agents (e.g., mechlorethamine, thioepa chlorambucil, melphalan, carmustine (BCNU) and lomustine (CCNU), cyclothosphamide, busulfan, dibromomannitol, streptozotocin, mitomycin C, and cisdichlorodiamine platinum (II) (DDP), and cisplatin); anthracyclines (e.g., daunorubicin (formerly daunomycin) and doxorubicin); antibiotics (e.g., dactinomycin (formerly actinomycin), bleomycin, mithramycin, and anthramycin (AMC)); Auristatin molecules (e.g., auristatin PHE, bryostatin 1, and solastatin 10; see Woyke et al., Antimicrob. Agents Chemother. 46:3802-8 (2002), Woyke et al., Antimicrob. Agents Chemother. 45:3580-4 (2001), Mohammad et al., Anticancer Drugs 12:735-40 (2001), Wall et al., Biochem. Biophys. Res. Commun. 266:76-80 (1999), Mohammad et al., Int. J. Oncol. 15:367-72 (1999), all of which are incorporated herein by reference); hormones (e.g., glucocorticoids, progestins, androgens, and estrogens), DNA-repair enzyme inhibitors (e.g., etoposide or topotecan), kinase inhibitors (e.g., compound ST1571, imatinib mesylate (Kantarjian et al., Clin Cancer Res. 8(7):2167-76 (2002)); cytotoxic agents (e.g., paclitaxel, cytochalasin B, gramicidin D, ethidium bromide, emetine, mitomycin, etoposide, tenoposide, vincristine, vinblastine, colchicin, doxorubicin, daunorubicin, dihydroxy anthracin dione, mitoxantrone, mithramycin, actinomycin D, 1-dehydrotestosterone, glucorticoids, procaine, tetracaine, lidocaine, propranolol, and puromycin and analogs or homologs thereof and those compounds disclosed in U.S. Pat. Nos. 6,245,759, 6,399,633, 6,383,790, 6,335,156, 6,271,242, 6,242,196, 6,218,410, 6,218,372, 6,057,300, 6,034,053, 5,985,877, 5,958,769, 5,925,376, 5,922,844, 5,911,995, 5,872,223, 5,863,904, 5,840,745, 5,728,868, 5,648,239, 5,587,459); farnesyl transferase inhibitors (e.g., R115777, BMS-214662, and those disclosed by, for example, U.S. Pat. Nos: 6,458,935, 6,451,812, 6,440,974, 6,436,960, 6,432,959, 6,420,387, 6,414,145, 6,410,541, 6,410,539, 6,403,581, 6,399,615, 6,387,905, 6,372,747, 6,369,034, 6,362,188, 6,342,765, 6,342,487, 6,300,501, 6,268,363, 6,265,422, 6,248,756, 6,239,140, 6,232,338, 6,228,865, 6,228,856, 6,225,322, 6,218,406, 6,211,193, 6,187,786, 6,169,096, 6,159,984, 6,143,766, 6,133,303, 6,127,366, 6,124,465, 6,124,295, 6,103,723, 6,093,737, 6,090,948, 6,080,870, 6,077,853, 6,071,935, 6,066,738, 6,063,930,.6,054,466, 6,051,582, 6,051,574, and 6,040,305); topoisomerase inhibitors (e.g., camptothecin; irinotecan; SN-38; topotecan; 9-aminocamptothecin; GG-211 (GI 147211); DX-8951f; IST-622; rubitecan; pyrazoloacridine; XR-5000; saintopin; UCE6; UCE1022; TAN-1518A; TAN 1518B; KT6006; KT6528; ED-110; NB-506; ED-110; NB-506; and rebeccamycin); bulgarein; DNA minor groove binders such as Hoescht dye 33342 and Hoechst dye 33258; nitidine; fagaronine; epiberberine; coralyne; beta-lapachone; BC-4-1; bisphosphonates (e.g., alendronate, cimadronte, clodronate, tiludronate, etidronate, ibandronate, neridronate, olpandronate, risedronate, piridronate, pamidronate, zolendronate) HMG-CoA reductase inhibitors, (e.g., lovastatin, simvastatin, atorvastatin, pravastatin, fluvastatin, statin, cerivastatin, lescol, lupitor, rosuvastatin and atorvastatin); antisense oligonucleotides (e.g., those disclosed in the U.S. Pat. Nos. 6,277,832, 5,998,596, 5,885,834, 5,734,033, and 5,618,709); adenosine deaminase inhibitors (e.g., Fludarabine phosphate and 2-Chlorodeoxyadenosine); ibritumomab tiuxetan (Zevalin®); tositumomab (Bexxar®)) and pharmaceutically acceptable salts, solvates, clathrates, and prodrugs thereof.

[0269] Further, an antibody of the invention may be conjugated or recombinantly fused to a therapeutic moiety or drug moiety that modifies a given biological response. Therapeutic moieties or drug moieties are not to be construed as limited to classical chemical therapeutic agents. For example, the drug moiety may be a protein, peptide, or polypeptide possessing a desired biological activity. Such proteins may include, for example, a toxin such as abrin, ricin A, pseudomonas exotoxin, cholera toxin, or diphtheria toxin; a protein such as tumor necrosis factor, γ-interferon, α-interferon, nerve growth factor, platelet derived growth factor, tissue plasminogen activator, an apoptotic agent, e.g., TNF-γ, TNF-γ, AIM I (see, International Publication No. WO 97/33899), AIM II (see, International Publication No. WO 97/34911), Fas Ligand (Takahashi et al., 1994, J. Immunol., 6:1567-1574), and VEGF (see, International Publication No. WO 99/23105), an anti-angiogenic agent, e.g., angiostatin, endostatin or a component of the coagulation pathway (e.g., tissue factor); or, a biological response modifier such as, for example, a lymphokine (e.g., interferon gamma, interleukin-1 (“IL-1”), interleukin-2 (“IL-2”), interleukin-5 (“IL-5”), interleukin-6 (“IL-6”), interleukin-7 (“IL-7”), interleukin 9 (“IL-9”), interleukin-10 (“IL-10”), interleukin-12 (“IL-12”), interleukin-15 (“IL-15”), interleukin-23 (“IL-23”), granulocyte macrophage colony stimulating factor (“GM-CSF”), and granulocyte colony stimulating factor (“G-CSF”)), or a growth factor (e.g., growth hormone (“GH”)), or a coagulation agent (e.g., calcium, vitamin K, tissue factors, such as but not limited to, Hageman factor (factor XII), high-molecular-weight kininogen (HMWK), prekallikrein (PK), coagulation proteins-factors II (prothrombin), factor V, XIIa, VIII, XIIIa, XI, XIa, IX, IXa, X, phospholipid, and fibrin monomer).

[0270] The present invention encompasses antibodies of the invention (e.g., modified antibodies) recombinantly fused or chemically conjugated (including both covalent and non-covalent conjugations) to a heterologous protein or polypeptide (or fragment thereof, preferably to a polypeptide of about 10, about 20, about 30, about 40, about 50, about 60, about 70, about 80, about 90 or about 100 amino acids) to generate fusion proteins. In particular, the invention provides fusion proteins comprising an antigen-binding fragment of an antibody of the invention (e.g., a Fab fragment, Fd fragment, Fv fragment, F(ab)₂ fragment, a VH domain, a VH CDR, a VL domain or a VL CDR) and a heterologous protein, polypeptide, or peptide. Preferably, the heterologous protein, polypeptide, or peptide that the antibody is fused to is useful for targeting the antibody to a particular cell type. For example, an antibody that immunospecifically binds to a cell surface receptor expressed by a particular cell type (e.g., an immune cell) may be fused or conjugated to a modified antibody of the invention.

[0271] In one embodiment, a fusion protein of the invention comprises AFFF, P12f2, P12f4, P11d4, A1e9, A12a6, A13c4, A17d4, A4B4, A8C7, 1X-493L1FR, H3-3F4, M3H9, Y10H6, DG, AFFF(1), 6H8, L1-7E5, L2-15B10, A13a11, A1h5, A4B4(1), A4B4L1FR-S28R (MEDI-524), A4B4-F52S, A17d4(1), A3e2, A14a4, A16b4, A17b5, A17f5, or A17h4 antibody and a heterologous polypeptide. In another embodiment, a fusion protein of the invention comprises an antigen-binding fragment of AFFF, P12f2, P12f4, P11d4, A1e9, A12a6, A13c4, A17d4, A4B4, A8C7, 1X-493L1FR, H3-3F4, M3H9, Y10H6, DG, AFFF(1), 6H8, L1-7E5, L2-15B10, A13a11, A1h5, A4B4(1), A4B4L1FR-S28R (MEDI-524), A4B4-F52S, A17d4(1), A3e2, A14a4, A16b4, A17b5, A17f5, or A17h4 and a heterologous polypeptide. In another embodiment, a fusion protein of the invention comprises one or more VH domains having the amino acid sequence of any one of the VH domains listed in Table 2 or one or more VL domains having the amino acid sequence of any one of the VL domains listed in Table 2 and a heterologous polypeptide. In another embodiment, a fusion protein of the present invention comprises one or more VH CDRs having the amino acid sequence of any one of the VH CDRs listed in Table 2 and/or Tables 3A-3C and a heterologous polypeptide. In another embodiment, a fusion protein comprises one or more VL CDRs having the amino acid sequence of any one of the VL CDRs listed in Table 2 and/or Tables 3D-3F and a heterologous polypeptide. In another embodiment, a fusion protein of the invention comprises at least one VH domain and at least one VL domain listed in Table 2 and a heterologous polypeptide. In yet another embodiment, a fusion protein of the invention comprises at least one VH CDR and at least one VL CDR domain listed in Table 2 and/or Tables 3A-3F and a heterologous polypeptide. In certain embodiments, the above-referenced antibodies comprise a modified IgG (e.g., IgG1) constant domain, or FcRn binding fragment thereof (e.g., the Fc domain or hinge-Fc domain), described herein, and preferably the modified IgG constant domain comprises the YTE modification (e.g., MEDI-524-YTE).

[0272] In addition, an antibody of the invention can be conjugated to therapeutic moieties such as a radioactive metal ion, such as alpha-emitters such as ²¹³Bi or macrocyclic chelators useful for conjugating radiometal ions, including but not limited to, ¹³¹In, ¹³¹LU, ¹³¹Y, ¹³¹Ho, ¹³¹Sm, to polypeptides. In certain embodiments, the macrocyclic chelator is 1,4,7,10-tetraazacyclododecane-N,N′,N″,N′″-tetraacetic acid (DOTA) which can be attached to the antibody via a linker molecule. Such linker molecules are commonly known in the art and described in Denardo et al., 1998, Clin Cancer Res. 4(10):2483-90; Peterson et al., 1999, Bioconjug. Chem. 10(4):553-7; and Zimmerman et al., 1999, Nucl. Med. Biol. 26(8):943-50, each incorporated by reference in their entireties.

[0273] Moreover, antibodies of the invention can be fused to marker sequences, such as a peptide to facilitate purification. In preferred embodiments, the marker amino acid sequence is a hexa-histidine peptide, such as the tag provided in a pQE vector (QIAGEN, Inc.), among others, many of which are commercially available. As described in Gentz et al., 1989, Proc. Natl. Acad. Sci. USA 86:821-824, for instance, hexa-histidine provides for convenient purification of the fusion protein. Other peptide tags useful for purification include, but are not limited to, the hemagglutinin (“HA”) tag, which corresponds to an epitope derived from the influenza hemagglutinin protein (Wilson et al., 1984, Cell 37:767), and the “flag” tag.

[0274] Methods for fusing or conjugating therapeutic moieties (including polypeptides) to antibodies are well known, see, e.g., Arnon et al., “Monoclonal Antibodies For Immunotargeting Of Drugs In Cancer Therapy”, in Monoclonal Antibodies And Cancer Therapy, Reisfeld et al. (eds.), pp. 243-56 (Alan R. Liss, Inc. 1985); Hellstrom et al., “Antibodies For Drug Delivery”, in Controlled Drug Delivery (2nd Ed.), Robinson et al. (eds.), pp. 623-53 (Marcel Dekker, Inc. 1987); Thorpe, “Antibody Carriers Of Cytotoxic Agents In Cancer Therapy: A Review”, in Monoclonal Antibodies 84: Biological And Clinical Applications, Pinchera et al. (eds.), pp. 475-506 (1985); “Analysis, Results, And Future Prospective Of The Therapeutic Use Of Radiolabeled Antibody In Cancer Therapy”, in Monoclonal Antibodies For Cancer Detection And Therapy, Baldwin et al. (eds.), pp. 303-16 (Academic Press 1985), Thorpe et al., 1982, Immunol. Rev. 62:119-58;—C—U.S. Pat. Nos. 5,336,603, 5,622,929, 5,359,046, 5,349,053, 5,447,851, 5,723,125, 5,783,181, 5,908,626, 5,844,095, and 5,112,946; EP 307,434; EP 367,166; EP 394,827; PCT publications WO 91/06570, WO 96/04388, WO 96/22024, WO 97/34631, and WO 99/04813; Ashkenazi et al., Proc. Natl. Acad. Sci. USA, 88: 10535-10539, 1991; Traunecker et al., Nature, 331:84-86, 1988; Zheng et al., J. Immunol., 154:5590-5600, 1995; Vil et al., Proc. Natl. Acad. Sci. USA, 89:11337-11341, 1992; and U.S. Provisional Application No. 60/727,043 (Attorney Docket No. 10271-165-888) filed Oct. 14, 2005 entitled “Methods of Preventing and Treating RSV Infections and Related Conditions;” and U.S. Provisional No. 60/727,042 (Attorney Docket No. 10271-174-888) filed Oct. 14, 2005 by Genevieve Losonsky entitled “Methods of Administering/Dosing Anti-RSV Antibodies for Prophylaxis and Treatment of RSV Infections and Respiratory Conditions;” which are incorporated herein by reference in their entireties.

[0275] In particular, fusion proteins may be generated, for example, through the techniques of gene-shuffling, motif-shuffling, exon-shuffling, and/or codon-shuffling (collectively referred to as “DNA shuffling”). DNA shuffling may be employed to alter the activities of antibodies of the invention (e.g., antibodies with higher affinities and lower dissociation rates). See, generally, U.S. Pat. Nos. 5,605,793, 5,811,238, 5,830,721, 5,834,252, and 5,837,458; Patten et al., 1997, Curr. Opinion Biotechnol. 8:724-33; Harayama, 1998, Trends Biotechnol. 16(2):76-82; Hansson, et al, 1999, J. Mol. Biol. 287:265-76; and Lorenzo and Blasco, 1998, Biotechniques 24(2):308-313 (each of these patents and publications are hereby incorporated by reference in its entirety). Antibodies, or the encoded antibodies, may be altered by being subjected to random mutagenesis by error-prone PCR, random nucleotide insertion or other methods prior to recombination. A polynucleotide encoding an antibody of the invention may be recombined with one or more components, motifs, sections, parts, domains, fragments, etc. of one or more heterologous molecules.

[0276] An antibody of the invention can also be conjugated to a second antibody to form an antibody heteroconjugate as described by Segal in U.S. Pat. No. 4,676,980, which is incorporated herein by reference in its entirety.

[0277] The therapeutic moiety or drug conjugated or recombinantly fused to an antibody of the invention that immunospecifically binds to a RSV antigen should be chosen to achieve the desired prophylactic or therapeutic effect(s). In certain embodiments, the antibody is a modified antibody. A clinician or other medical personnel should consider the following when deciding on which therapeutic moiety or drug to conjugate or recombinantly fuse to an antibody of the invention: the nature of the disease, the severity of the disease, and the condition of the subject.

[0278] Antibodies of the invention may also be attached to solid supports, which are particularly useful for immunoassays or purification of the target antigen. Such solid supports include, but are not limited to, glass, cellulose, polyacrylamide, nylon, polystyrene, polyvinyl chloride or polypropylene.

### 5.1.3 Intrabody Proteins as Therapeutics

[0279] In some embodiments, an antibody of the invention is an intrabody. Methods of producing intrabodies are discussed in Section 5.7, infra. In one embodiment, a recombinantly expressed intrabody protein is administered to a patient. Such an intrabody polypeptide must be intracellular to mediate a prophylactic or therapeutic effect. In this embodiment of the invention, the intrabody polypeptide is associated with a “membrane permeable sequence.” Membrane permeable sequences are polypeptides capable of penetrating through the cell membrane from outside of the cell to the interior of the cell. When linked to another polypeptide, membrane permeable sequences can also direct the translocation of that polypeptide across the cell membrane as well.

[0280] In one embodiment, the membrane permeable sequence is the hydrophobic region of a signal peptide (see, e.g., Hawiger, 1999, Curr. Opin. Chem. Biol. 3:89-94; Hawiger, 1997, Curr. Opin. Immunol. 9:189-94; U.S. Pat. Nos. 5,807,746 and 6,043,339, which are incorporated herein by reference in their entireties). The sequence of a membrane permeable sequence can be based on the hydrophobic region of any signal peptide. The signal peptides can be selected, e.g., from the SIGPEP database (see e.g., von Heijne, 1987, Prot. Seq. Data Anal. 1:41-2; von Heijne and Abrahmsen, 1989, FEBS Lett. 224:439-46). When a specific cell type is to be targeted for insertion of an intrabody polypeptide, the membrane permeable sequence is preferably based on a signal peptide endogenous to that cell type. In another embodiment, the membrane permeable sequence is a viral protein (e.g., Herpes Virus Protein VP22) (see e.g., Phelan et al., 1998, Nat. Biotechnol. 16:440-3). A membrane permeable sequence with the appropriate properties for a particular intrabody and/or a particular target cell type can be determined empirically by assessing the ability of each membrane permeable sequence to direct the translocation of the intrabody across the cell membrane. Examples of membrane permeable sequences include, but are not limited to, those sequences disclosed in Table 4.

TABLE 4

| Sequence | SEQ ID NO. |
|---|---|
| Ala Ala Val Ala Leu Lue Pro Ala Val Leu Leu | SEQ ID NO: 37 |
| Ala Leu Leu Ala Pro | |
| Ala Ala Val Leu Leu Pro Val Leu Leu Ala Ala Pro | SEQ ID NO: 38 |
| Val Thr Val Leu Ala Leu Gly Ala Leu Ala Gly Val | SEQ ID NO: 39 |
| Gly Val Gly | |

[0281] In another embodiment, the membrane permeable sequence can be a derivative. In this embodiment, the amino acid sequence of a membrane permeable sequence has been altered by the introduction of amino acid residue substitutions, deletions, additions, and/or modifications. For example, but not by way of limitation, a polypeptide may be modified, e.g., by glycosylation, acetylation, pegylation, phosphorylation, amidation, derivatization by known protecting/blocking groups, proteolytic cleavage, linkage to a cellular ligand or other protein, etc. A derivative of a membrane permeable sequence polypeptide may be modified by chemical modifications using techniques known to those of skill in the art, including, but not limited to specific chemical cleavage, acetylation, formylation, metabolic synthesis of tunicamycin, etc. Further, a derivative of a membrane permeable sequence polypeptide may contain one or more non-classical amino acids. In one embodiment, a polypeptide derivative possesses a similar or identical function as an unaltered polypeptide. In another embodiment, a derivative of a membrane permeable sequence polypeptide has an altered activity when compared to an unaltered polypeptide. For example, a derivative membrane permeable sequence polypeptide can translocate through the cell membrane more efficiently or be more resistant to proteolysis.

[0282] The membrane permeable sequence can be attached to the intrabody in a number of ways. In one embodiment, the membrane permeable sequence and the intrabody are expressed as a fusion protein. In this embodiment, the nucleic acid encoding the membrane permeable sequence is attached to the nucleic acid encoding the intrabody using standard recombinant DNA techniques (see e.g., Rojas et al., 1998, Nat. Biotechnol. 16:370-5). In a further embodiment, there is a nucleic acid sequence encoding a spacer peptide placed in between the nucleic acids encoding the membrane permeable sequence and the intrabody. In another embodiment, the membrane permeable sequence polypeptide is attached to the intrabody polypeptide after each is separately expressed recombinantly (see e.g., Zhang et al., 1998, PNAS 95:9184-9). In this embodiment, the polypeptides can be linked by a peptide bond or a non peptide bond (e.g., with a crosslinking reagent such as glutaraldehyde or a thiazolidino linkage see e.g., Hawiger, 1999, Curr. Opin. Chem. Biol. 3:89-94) by methods standard in the art.

[0283] The administration of the membrane permeable sequence-intrabody polypeptide can be by parenteral administration, e.g., by intravenous injection including regional perfusion through a blood vessel supplying the tissues(s) or organ(s) having the target cell(s), or by inhalation of an aerosol, subcutaneous or intramuscular injection, intranasal administration, topical administration such as to skin wounds and lesions, direct transfection into, e.g., bone marrow cells prepared for transplantation and subsequent transplantation into the subject, and direct transfection into an organ that is subsequently transplanted into the subject. Further administration methods include oral administration, particularly when the complex is encapsulated, or rectal administration, particularly when the complex is in suppository form. A pharmaceutically acceptable carrier includes any material that is not biologically or otherwise undesirable, i.e., the material may be administered to an individual along with the selected complex without causing any undesirable biological effects or interacting in a deleterious manner with any of the other components of the pharmaceutical composition in which it is contained.

[0284] Conditions for the administration of the membrane permeable sequence-intrabody polypeptide can be readily be determined, given the teachings in the art (see e.g., Remington's Pharmaceutical Sciences, 18^{th} Ed., E. W. Martin (ed.), Mack Publishing Co., Easton, Pa. (1990)). If a particular cell type in vivo is to be targeted, for example, by regional perfusion of an organ or tumor, cells from the target tissue can be biopsied and optimal dosages for import of the complex into that tissue can be determined in vitro to optimize the in vivo dosage, including concentration and time length. Alternatively, culture cells of the same cell type can also be used to optimize the dosage for the target cells in vivo.

### 5.2 Prophylactic and Therapeutic Uses of Antibodies

[0285] The present invention is directed to antibody-based therapies which involve administering antibodies of the invention to a subject, preferably a human, (e.g., to a subject in need thereof) for preventing, managing, treating and/or ameliorating a RSV infection (e.g., acute RSV disease, or a RSV URI and/or LRI), otitis media (preferably, stemming from, caused by or associated with a RSV infection, such as a RSV URI and/or LRI), and/or a symptom or respiratory condition relating thereto (e.g., asthma, wheezing, and/or RAD). Prophylactic and therapeutic agents of the invention include, but are not limited to, antibodies of the invention (including analogs and derivatives thereof as described herein) and nucleic acids encoding the antibodies of the invention (including analogs and derivatives thereof and anti-idiotypic antibodies as described herein). Antibodies of the invention may be provided in pharmaceutically acceptable compositions as known in the art or as described herein (see, e.g., Sections 5.1 and 5.3). The antibody used in accordance with the methods of the invention may or may not comprise a modified IgG (e.g., IgG1) constant domain, or FcRn-binding fragment thereof (e.g., Fc or hinge-Fc domain). In certain embodiments, the antibody is a modified antibody, and preferably the IgG constant domain comprises the YTE modification (e.g., MEDI-524 YTE).

[0286] Antibodies of the present invention that function as antagonists of a RSV infection can be administered to a subject, preferably a human, to treat, prevent or ameliorate a RSV URI and/or LRI, otitis media (preferably, stemming from, caused by, or associated with a RSV infection), or a symptom or respiratory condition relating thereto (including, but not limited to, asthma, wheezing, RAD, or a combination thereof). For example, antibodies that disrupt or prevent the interaction between a RSV antigen and its host cell receptor may be administered to subject, preferably a human, to prevent, manage, treat and/or ameliorate a RSV infection (e.g., acute RSV disease, or a RSV URI and/or LRI), otitis media (preferably, stemming from, caused by or associated with a RSV infection, such as a RSV URI and/or LRI), and/or a symptom or respiratory condition relating thereto (e.g., asthma, wheezing, and/or RAD).

[0287] In a specific embodiment, an antibody of the invention prevents or inhibits RSV from binding to its host cell receptor by at least 99%, at least 95%, at least 90%, at least 85%, at least 80%, at least 75%, at least 70%, at least 60%, at least 50%, at least 45%, at least 40%, at least 45%, at least 35%, at least 30%, at least 25%, at least 20%, or at least 10% relative to RSV binding to its host cell receptor in the absence of said antibody or in the presence of a negative control in an assay known to one of skill in the art or described herein, such as by a competition assay (see, e.g., Example 6.8) or microneutralization assay (see, e.g., Example 6.6). In another embodiment, a combination of antibodies of the invention prevents or inhibits RSV from binding to its host cell receptor by at least 99%, at least 95%, at least 90%, at least 85%, at least 80%, at least 75%, at least 70%, at least 60%, at least 50%, at least 45%, at least 40%, at least 45%, at least 35%, at least 30%, at least 25%, at least 20%, or at least 10% relative to RSV binding to its host cell receptor in the absence of said antibodies or in the presence of a negative control in an assay known to one of skill in the art or described herein. In certain embodiments, the above-referenced antibodies comprise a modified IgG (e.g., IgG1) constant domain, or FcRn binding fragment thereof (e.g., the Fc domain or hinge-Fc domain), described herein, and preferably the modified IgG constant domain comprises the YTE modification (e.g., MEDI-524-YTE). In certain embodiments, one or more modified and/or unmodified antibodies of the invention can be administered either alone or in combination. In some embodiments, a combination of antibodies of the invention act synergistically to prevent or inhibit RSV from binding to its host and receptor and/or in preventing, managing, treating and/or ameliorating a RSV infection (e.g., acute RSV disease, or a RSV URI and/or LRI), otitis media (preferably, stemming from, caused by or associated with a RSV infection, such as a RSV URI and/or LRI), and/or a symptom or respiratory condition relating thereto (e.g., asthma, wheezing, and/or RAD).

[0288] In a specific embodiment, an antibody of the invention (modified or unmodified) prevents or inhibits RSV-induced fusion by at least 99%, at least 95%, at least 90%, at least 85%, at least 80%, at least 75%, at least 70%, at least 60%, at least 50%, at least 45%, at least 40%, at least 45%, at least 35%, at least 30%, at least 25%, at least 20%, or at least 10% relative to RSV-induced fusion in the absence of said antibody or in the presence of a negative control in an assay known to one of skill in the art or described herein (see, e.g., Example 6.6). In another embodiment, a combination of antibodies of the invention prevents or inhibits RSV-induced fusion by at least 99%, at least 95%, at least 90%, at least 85%, at least 80%, at least 75%, at least 70%, at least 60%, at least 50%, at least 45%, at least 40%, at least 45%, at least 35%, at least 30%, at least 25%, at least 20%, or at least 10% relative to RSV-induced fusion in the absence of said antibodies or in the presence of a negative control in an assay known to one of skill in the art or described herein. In certain embodiments, the above-referenced antibodies comprise a modified IgG (e.g., IgG1) constant domain, or FcRn binding fragment thereof (e.g., the Fc domain or hinge-Fc domain), described herein, and preferably the modified IgG constant domain comprises the YTE modification (e.g., MEDI-524-YTE). Thus, in some embodiments, the antibody is a modified antibody, and in other embodiments, the antibody is not a modified antibody.

[0289] In a specific embodiment, an antibody of the invention prevents or inhibits RSV-induced fusion after viral attachment to cells by at least 99%, at least 95%, at least 90%, at least 85%, at least 80%, at least 75%, at least 70%, at least 60%, at least 50%, at least 45%, at least 40%, at least 45%, at least 35%, at least 30%, at least 25%, at least 20%, or at least 10% relative to RSV-induced fusion after viral attachment to cells in the absence of said antibody or in the presence of a negative control in an assay known to one of skill in the art or described herein (see, e.g., Example 6.6). In another embodiment, a combination of antibodies of the invention prevents or inhibits RSV-induced fusion after viral attachment to cells by at least 99%, at least 95%, at least 90%, at least 85%, at least 80%, at least 75%, at least 70%, at least 60%, at least 50%, at least 45%, at least 40%, at least 45%, at least 35%, at least 30%, at least 25%, at least 20%, or at least 10% relative to RSV-induced fusion after viral attachment to cells in the absence of said antibodies or in the presence of a negative control in an assay known to one of skill in the art or described herein. In certain embodiments, the above-referenced antibodies comprise a modified IgG (e.g., IgG1) constant domain, or FcRn binding fragment thereof (e.g., the Fc domain or hinge-Fc domain), described herein, and preferably the modified IgG constant domain comprises the YTE modification (e.g., MEDI-524-YTE). Thus, in some embodiments, the antibody is a modified antibody, and in other embodiments, the antibody is not a modified antibody.

[0290] Antibodies of the invention that do not prevent RSV from binding its host cell receptor but inhibit or downregulate RSV replication or inhibit RSV fusion to a cell can also be administered to a subject to treat, prevent or ameliorate a RSV URI and/or LRI, otitis media (stemming from, caused by, or associated with a RSV infection), or a symptom or respiratory condition relating thereto (including, but not limited to, asthma, wheezing, RAD, or a combination thereof). The ability of an antibody of the invention to inhibit or downregulate RSV replication may be determined by techniques described herein or otherwise known in the art(see, e.g., Example 6.4). For example, the inhibition or downregulation of RSV replication can be determined by detecting the RSV titer in the lungs of a subject, preferably a human. In further embodiments, the inhibition or downregulation of RSV replication can be determined by detecting the amount of RSV in the nasal passages or in the middle ear by methods known in the art (e.g., Northern blot analysis, RT-PCR, Western Blot analysis, etc.). In certain embodiments, the above-referenced antibodies comprise a modified IgG (e.g., IgG1) constant domain, or FcRn binding fragment thereof (e.g., the Fc domain or hinge-Fc domain), described herein, and preferably the modified IgG constant domain comprises the YTE modification (e.g., MEDI-524-YTE). Thus, in some embodiments, the antibody is a modified antibody, and in other embodiments, the antibody is not a modified antibody.

[0291] In some embodiments, an antibody of the invention results in reduction of about 1-fold, about 1.5-fold, about 2-fold, about 3-fold, about 4-fold, about 5-fold, about 8-fold, about 10-fold, about 15-fold, about 20-fold, about 25-fold, about 30-fold, about 35-fold, about 40-fold, about 45-fold, about 50-fold, about 55-fold, about 60-fold, about 65-fold, about 70-fold, about 75-fold, about 80-fold, about 85-fold, about 90-fold, about 95-fold, about 100-fold, about 105 fold, about 110-fold, about 115-fold, about 120 fold, about 125-fold or higher in RSV titer in the lung. The fold-reduction in RSV titer may be as compared to a negative control (such as placebo), as compared to another treatment (including, but not limited to treatment with palivizumab), or as compared to the titer in the patient prior to antibody administration. In certain embodiments, the above-referenced antibody comprises a modified IgG (e.g., IgG1) constant domain, or FcRn binding fragment thereof (e.g., the Fc domain or hinge-Fc domain), described herein, and preferably the modified IgG constant domain comprises the YTE modification (e.g., MEDI-524-YTE). Thus, in some embodiments, the antibody is a modified antibody, and in other embodiments, the antibody is not a modified antibody. In embodiments, wherein the antibody is a modified antibody of the invention, the reduction may further be compared to a subject receiving the same antibody without the modifications in the IgG constant domain.

[0292] In a specific embodiment, an antibody of the present invention inhibits or downregulates RSV replication by at least 99%, at least 95%, at least 90%, at least 85%, at least 80%, at least 75%, at least 70%, at least 60%, at least 50%, at least 45%, at least 40%, at least 45%, at least 35%, at least 30%, at least 25%, at least 20%, or at least 10% relative to RSV replication in absence of said antibody or in the presence of a negative control in an assay known in the art or described herein (see, e.g., Example 6.4). In another embodiment, a combination of antibodies of the invention inhibits or downregulates RSV replication by at least 99%, at least 95%, at least 90%, at least 85%, at least 80%, at least 75%, at least 70%, at least 60%, at least 50%, at least 45%, at least 40%, at least 45%, at least 35%, at least 30%, at least 25%, at least 20%, or at least 10% relative to RSV replication in absence of said antibodies or in the presence of a negative control in an assay known in the art or described herein. In certain embodiments, the above-referenced antibodies comprise a modified IgG (e.g., IgG1) constant domain, or FcRn binding fragment thereof (e.g., the Fc domain or hinge-Fc domain), described herein, and preferably the modified IgG constant domain comprises the YTE modification (e.g., MEDI-524-YTE). Thus, in some embodiments, the antibody is a modified antibody, and in other embodiments, the antibody is not a modified antibody.

[0293] In some embodiments, an antibody of the invention results in reduction of about 1-fold, about 1.5-fold, about 2-fold, about 3-fold, about 4-fold, about 5-fold, about 8-fold, about 10-fold, about 15-fold, about 20-fold, about 25-fold, about 30-fold, about 35-fold, about 40-fold, about 45-fold, about 50-fold, about 55-fold, about 60-fold, about 65-fold, about 70-fold, about 75-fold, about 80-fold, about 85-fold, about 90-fold, about 95-fold, about 100-fold, about 105 fold, about I I0-fold, about 115-fold, about 120 fold, about 125-fold or higher in RSV titer in the upper respiratory tract. The fold-reduction in RSV titer may be as compared to a negative control (such as placebo), as compared to another treatment (including, but not limited to treatment with palivizumab), or as compared to the titer in the patient prior to antibody administration. In certain embodiments, the above-referenced antibody comprise a modified IgG (e.g., IgG1) constant domain, or FcRn binding fragment thereof (e.g., the Fc domain or hinge-Fc domain), described herein, and preferably the modified IgG constant domain comprises the YTE modification (e.g., MEDI-524-YTE). Thus, in some embodiments, the antibody is a modified antibody, and in other embodiments, the antibody is not a modified antibody. In embodiments, wherein the antibody is a modified antibody of the invention, the reduction may further be compared to a subject receiving the same antibody without the modifications in the IgG constant domain.

[0294] In other embodiments, an antibody of the invention results in reduction of about 1-fold, about 1.5-fold, about 2-fold, about 3-fold, about 4-fold, about 5-fold, about 8-fold, about 10-fold, about 15-fold, about 20-fold, about 25-fold, about 30-fold, about 35-fold, about 40-fold, about 45-fold, about 50-fold, about 55-fold, about 60-fold, about 65-fold, about 70-fold, about 75-fold, about 80-fold, about 85-fold, about 90-fold, about 95-fold, about 100-fold, about 105 fold, about 110-fold, about 115-fold, about 120 fold, about 125-fold or higher in RSV titer in the lower respiratory tract. The fold-reduction in RSV titer may be as compared to a negative control (such as placebo), as compared to another treatment (including, but not limited to treatment with palivizumab), or as compared to the titer in the patient prior to antibody administration. In certain embodiments, the above-referenced antibody comprises a modified IgG (e.g., IgG1) constant domain, or FcRn binding fragment thereof (e.g., the Fc domain or hinge-Fc domain), described herein, and preferably the modified IgG constant domain comprises the YTE modification (e.g., MEDI-524-YTE). Thus, in some embodiments, the antibody is a modified antibody, and in other embodiments, the antibody is not a modified antibody. In embodiments, wherein the antibody is a modified antibody of the invention, the reduction may further be compared to a subject receiving the same antibody without the modifications in the IgG constant domain.

[0295] One or more antibodies of the present invention (e.g., a MEDI-524 antibody or a modified MEDI-524 antibody, such as MEDI-524-YTE) have reduced or no cross-reactivity with human, rat (e.g., cotton rat), and/or monkey (e.g., cynomolgus monkey, or chimpanzee) tissue samples as compared to another anti-RSV antibody, as determined by techniques described herein or otherwise known in the art (see, e.g., Example 6.19). In some embodiments, an antibody of the invention has reduced or no cross-reactivity as compared to A4b4 (see, e.g., Example 6.19). In some embodiments, the antibody of the invention has reduced or no cross reactivity as that seen with a negative control antibody (e.g., an anti-human IgG antibody, such as a human monoclonal IgG1 kappa antibody, with different antigen specificity than the antibody of the invention). In certain embodiments, the tissue sample is skin or lung. In other embodiments, the tissue sample is adrenal gland, blood leukocytes, blood vessel (e.g., endothelium), bone marrow, brain (e.g., cerebrum or cerebellum), breast (mammary gland), eye, colon, large intestine, small intestine, esophagus, stomach, heart, kidney (e.g., glomerulus or tubule), liver, lung, lymph node, ovary, fallopian tube (e.g., oviduct), pancreas, parathyroid, peripheral nerve, pituitary, placenta, prostate, salivary gland, skin, spinal cord, spleen, striated (e.g., skeletal) muscle, testis, thymus, thyroid, tonsil, ureter, urinary bladder, and/or uterus (e.g., endometrium or cervix) tissue. In certain embodiments, the antibody (e.g., a MEDI-524 antibody or a modified MEDI-524 antibody, such as MEDI-524-YTE) has a reduction in cross-reactivity with a human tissue sample (e.g., skin or lung) of about 100-fold, 90-fold, 80-fold, 70-fold, 60-fold, 50-fold, 40-fold, 30-fold, 20-fold, 10-fold, 5-fold, or 2-fold as compared to another anti-RSV antibody (e.g., A4b4). In preferred embodiments, the tissue is skin or lung and the antibody (e.g., a MEDI-524 or a modified MEDI-524 antibody, such as MEDI-524-YTE) has reduced or no cross-reactivity with the tissue as compared to A4b4, as determined by techniques described herein or otherwise known in the art (see, e.g., Example 6.19).

[0296] One or more antibodies of the present invention that immunospecifically bind to one or more RSV antigens may be used locally or systemically in the body as a prophylactic or therapeutic agent. The antibodies of the invention may also be advantageously utilized in combination with other antibodies (e.g., monoclonal or chimeric antibodies), or with lymphokines or hematopoietic growth factors (such as, e.g., IL-2, IL-3 and IL-7), which, for example, serve to increase the number or activity of effector cells which interact with the antibodies. The antibodies of this invention may also be advantageously utilized in combination with other antibodies (e.g., monoclonal or chimeric antibodies), or with lymphokines or hematopoietic growth factors (such as, e.g., IL-2, IL-3 and IL-7), which, for example, serve to increase the immune response. The antibodies of this invention may also be advantageously utilized in combination with one or more drugs used to treat RSV infection such as, for example anti-viral agents. Antibodies of the invention may be used in combination with one or more of the following drugs: ribavirin (Valent Pharmaceuticals International), NIH-351 (Gemini Technologies), recombinant RSV vaccine (MedImmune Vaccines), RSVf-2 (Intracel), F-50042 (Pierre Fabre), T-786 (Trimeris), VP-36676 (ViroPharma), RFI-641 (American Home Products), VP-14637 (ViroPharma), PFP-1 and PFP-2 (American Home Products), RSV vaccine (Avant Immunotherapeutics), F-50077 (Pierre Fabre), and any one of the anti-viral polycyclic compounds taught in WO 05/061513 (Biota Scientific Management Pty Ltd.). In a specific embodiment, an effective amount of an antibody of the invention and an effective amount of another therapy is used.

[0297] The antibodies of the invention may be administered alone or in combination with other types of therapies (e.g., hormonal therapy, immunotherapy, and anti-inflammatory agents). In some embodiments, the antibodies of the invention act synergistically with the other therapies. Generally, administration of products of a species origin or species reactivity (in the case of antibodies) that is the same species as that of the patient is preferred. Thus, in a preferred embodiment, human or humanized antibodies, derivatives, analogs, or nucleic acids, are administered to a human patient for therapy or prophylaxis.

[0298] In specific embodiments, an antibody of the invention is administered in combination with one or more anti-IL-9 antibodies (such as those disclosed in U.S. Publication No. 2005/0002934) either alone or in combination with one or more modified antibodies of the invention and/or other types of therapies or other agents (e.g., hormone therapy, immunotherapy, and anti-inflammatory agents, such as those disclosed in U.S. Publication No. 2005/0002934, which is herein incorporated by reference in its entirety).

[0299] It is preferred to use high affinity and/or potent in vivo inhibiting antibodies and/or neutralizing antibodies that immunospecifically bind to a RSV antigen, for both immunoassays directed to RSV, and the prevention, management, treatment and/or amelioration of a RSV infection (e.g., acute RSV disease, or a RSV URI and/or LRI), otitis media (preferably, stemming from, caused by or associated with a RSV infection, such as a RSV URI and/or LRI), and/or a symptom or respiratory condition relating thereto (e.g., asthma, wheezing, and/or RAD). It is also preferred to use polynucleotides encoding high affinity and/or potent in vivo inhibiting antibodies and/or neutralizing antibodies that immunospecifically bind to a RSV antigen, for both immunoassays directed to RSV and therapy for a RSV infection (e.g., acute RSV disease, or a RSV URI and/or LRI), otitis media (preferably, stemming from, caused by or associated with a RSV infection, such as a RSV URI and/or LRI), and/or a symptom or respiratory condition relating thereto (e.g., asthma, wheezing, and/or RAD). Such antibodies will preferably have an affinity for the RSV F glycoprotein and/or fragments of the F glycoprotein.

[0300] The methods of the invention comprise the administration of one or more antibodies of the invention to patients suffering from or expected to suffer from (e.g., patients with a genetic predisposition for or patients that have previously suffered from) a RSV infection (e.g., acute RSV disease or RSV URI and/or LRI), otitis media (preferably, stemming from, caused by, or associated with a RSV infection), or a symptom or respiratory condition relating thereto (including, but not limited to, asthma, wheezing, RAD, or a combination thereof). Such patients may have been previously treated or are currently being treated for the RSV infection, otitis media, or a symptom or respiratory condition related thereto, e.g., with a therapy other than a modified antibody of the invention. In one embodiment, the methods of the invention comprise the administration of one or more antibodies of the invention to patients that are immunocompromised or immunosuppressed. In another embodiment, an antibody of the invention is administered to a human with cystic fibrosis, bronchopulmonary dysplasia, congenital heart disease, congenital immunodeficiency or acquired immunodeficiency, or to a human who has had a bone marrow transplant to prevent, manage, treat and/or ameliorate a RSV infection (e.g., acute RSV disease, or a RSV URI and/or LRI), otitis media (preferably, stemming from, caused by or associated with a RSV infection, such as a RSV URI and/or LRI), and/or a symptom or respiratory condition relating thereto (e.g., asthma, wheezing, and/or RAD). In another embodiment, an antibody of the invention is administered to a human infant, preferably a human infant born prematurely or a human infant at risk of hospitalization for RSV infection, to prevent, manage, treat and/or ameliorate a RSV infection (e.g., acute RSV disease, or a RSV URI and/or LRI), otitis media (preferably, stemming from, caused by or associated with a RSV infection, such as a RSV URI and/or LRI), and/or a symptom or respiratory condition relating thereto (e.g., asthma, wheezing, and/or RAD). In yet another embodiment, an antibody of the invention is administered to the elderly or people in group homes (e.g., nursing homes or rehabilitation centers). In accordance with the invention, an antibody of the invention may be used as any line of therapy, including, but not limited to, a first, second, third, fourth and/or fifth line of therapy. Further, in accordance with the invention, an antibody of the invention can be used before or after any adverse effects or intolerance of the therapies other than an antibody of the invention occurs. The invention encompasses methods for administering one or more antibodies of the invention to prevent the onset of an acute RSV disease and/or to treat or lessen the recurrence of a RSV URI and/or LRI or otitis media.

[0301] In one embodiment, the invention also provides methods of prevention, management, treatment and/or amelioration of a RSV infection (e.g., acute RSV disease, or a RSV URI and/or LRI), otitis media (preferably, stemming from, caused by or associated with a RSV infection, such as a RSV URI and/or LRI), and/or a symptom or respiratory condition relating thereto (e.g., asthma, wheezing, and/or RAD) as alternatives to current therapies. In a specific embodiment, the current therapy has proven or may prove to be too toxic (i.e., results in unacceptable or unbearable side effects) for the patient. In another embodiment, an antibody of the invention decreases the side effects as compared to the current therapy. In another embodiment, the patient has proven refractory to a current therapy. In such embodiments, the invention provides for the administration of one or more antibodies of the invention without any other anti-infection therapies. In certain embodiments, a patient with a RSV infection (e.g., acute RSV disease or RSV URI and/or LRI), is refractory to a therapy when the infection has not significantly been eradicated and/or the symptoms have not been significantly alleviated. The determination of whether a patient is refractory can be made either in vivo or in vitro by any method known in the art for assaying the effectiveness of a therapy for infections, using art-accepted meanings of “refractory” in such a context. In various embodiments, a patient with a RSV infection (e.g., acute RSV disease or RSV URI and/or LRI) is refractory when viral replication has not decreased or has increased following therapy.

[0302] In certain embodiments, one or more antibodies of the invention can be administered to a patient instead of another therapy to treat a RSV infection (e.g., acute RSV disease or RSV URI and/or LRI), otitis media or a symptom or respiratory condition related thereto (including, but not limited to, asthma, wheezing, RAD, or a combination thereof). In one embodiment, the invention provides methods of preventing, managing, treating and/or ameliorating a RSV infection (e.g., acute RSV disease, or a RSV URI and/or LRI), otitis media (preferably, stemming from, caused by or associated with a RSV infection, such as a RSV URI and/or LRI), and/or a symptom or respiratory condition relating thereto (e.g., asthma, wheezing, and/or RAD). The invention also encompasses methods of preventing the onset or reoccurrence of a RSV infection (e.g., acute RSV disease, or a RSV URI and/or LRI) or otitis media (preferably, stemming from, caused by or associated with a RSV infection, such as a RSV URI and/or LRI) in patients at risk of developing such infections or otitis media.

[0303] In certain embodiments, an effective amount of one or more modified antibodies of the invention is administered in combination with one or more supportive measures to a subject to prevent, manage, treat and/or ameliorate a RSV infection (e.g., acute RSV disease, or a RSV URI and/or LRI), otitis media (preferably, stemming from, caused by or associated with a RSV infection, such as a RSV URI and/or LRI), and/or a symptom or respiratory condition relating thereto (e.g., asthma, wheezing, and/or RAD). Non-limiting examples of supportive measures include humidification of the air by an ultrasonic nebulizer, aerolized racemic epinephrine, oral dexamethasone, intravenous fluids, intubation, fever reducers (e.g., ibuprofen, acetometaphin), and antibiotic and/or anti-fungal therapy (i.e., to prevent or treat secondary bacterial and/or fungal infections).

[0304] In a specific embodiment, the invention provides methods for preventing, managing, treating and/or ameliorating a RSV infection (e.g., acute RSV disease, or a RSV URI and/or LRI), otitis media (preferably, stemming from, caused by or associated with a RSV infection, such as a RSV URI and/or LRI), and/or a symptom or respiratory condition relating thereto (e.g., asthma, wheezing, and/or RAD), said methods comprising administering to a subject an effective amount of one or more antibodies of the invention alone or in combination with one or more anti-viral agents such as, but not limited to, amantadine, rimantadine, oseltamivir, znamivir, ribavarin, RSV-IVIG (i.e., intravenous immune globulin infusion) (RESPIGAM™), EphA2/EphrinA1 Modulators, and/or an anti-IL-9 antibody (see, e.g., U.S. Publication No. 2005/0002934), and/or any one of the anti-viral polycyclic compounds disclosed in WO 05/061513.

[0305] In a specific embodiment, the invention provides methods for preventing, managing, treating, and/or ameliorating one or more secondary responses to a primary viral infection, said methods comprising administering an effective amount of one or more antibodies of the invention alone or in combination with an effective amount of other therapies (e.g., other prophylactic or therapeutic agents). Examples of secondary responses to a primary viral infection include, but are not limited to, asthma-like responsiveness to mucosal stimula, elevated total respiratory resistance, increased susceptibility to secondary viral, bacterial, and fungal infections, and development of conditions such as, but not limited to, bronchiolitis, pneumonia, croup, and febrile bronchitis.

[0306] In a specific embodiment, the invention provides methods of preventing, managing, treating and/or ameliorating a RSV infection (e.g., acute RSV disease, or a RSV URI and/or LRI), otitis media (preferably, stemming from, caused by or associated with a RSV infection, such as a RSV URI and/or LRI), and/or a symptom or respiratory condition relating thereto (e.g., asthma, wheezing, and/or RAD), said methods comprising administering to a subject an effective amount of one or more antibodies of the invention in combination with an effective amount of an EphA2/EphrinA1 Modulator (U.S. Provisional Appn. Ser. No. 60/622,489, filed Oct. 27, 2004, entitled “Use of Modulators of EphA2 and EphrinA 1 for the Treatment and Prevention of Infections,” which is incorporated by reference herein in its entirety). In another specific embodiment, the invention provides methods for preventing, managing, treating and/or ameliorating a RSV infection (e.g., acute RSV disease, or a RSV URI and/or LRI), otitis media (preferably, stemming from, caused by or associated with a RSV infection, such as a RSV URI and/or LRI), and/or a symptom or respiratory condition relating thereto (e.g., asthma, wheezing, and/or RAD), said methods comprising administering to a subject an effective amount of one or more antibodies of the invention in combination with an effective amount of siplizumab (MedImmune, Inc., International Pub. No. WO 02/069904, which is incorporated herein by reference in its entirety). In another embodiment, the invention provides methods of preventing, managing, treating and/or ameliorating a RSV infection (e.g., acute RSV disease, or a RSV URI and/or LRI), otitis media (preferably, stemming from, caused by or associated with a RSV infection, such as a RSV URI and/or LRI), and/or a symptom or respiratory condition relating thereto (e.g., asthma, wheezing, and/or RAD), said methods comprising administering to a subject an effective amount of one or more antibodies in combination with an effective amount of one or more anti-IL-9 antibodies, such as those disclosed in U.S. Publication No. 2005/0002934, which is incorporated herein by reference in its entirety. In yet another embodiment, the invention provides methods for preventing, managing, treating and/or ameliorating a RSV infection (e.g., acute RSV disease, or a RSV URI and/or LRI), otitis media (preferably, stemming from, caused by or associated with a RSV infection, such as a RSV URI and/or LRI), and/or a symptom or respiratory condition relating thereto (e.g., asthma, wheezing, and/or RAD), said methods comprising administering to a subject an effective amount of one or more antibodies of the invention in combination with an effective amount of two or more of the following: EphA2/EphrinA1 modulators, an anti-IL-9 antibody and/or siplizumab.

[0307] The invention also encompasses methods of preventing, managing, treating and/or ameliorating a RSV infection (e.g., acute RSV disease, or a RSV URI and/or LRI), otitis media (preferably, stemming from, caused by or associated with a RSV infection, such as a RSV URI and/or LRI), and/or a symptom or respiratory condition relating thereto (e.g., asthma, wheezing, and/or RAD) in patients who are susceptible to adverse reactions to conventional therapies. The invention further encompasses methods for preventing, managing, treating and/or ameliorating a RSV infection (e.g., acute RSV disease, or a RSV URI and/or LRI), otitis media (preferably, stemming from, caused by or associated with a RSV infection, such as a RSV URI and/or LRI), and/or a symptom or respiratory condition relating thereto (e.g., asthma, wheezing, and/or RAD) for which no other anti-viral therapy is available.

[0308] The invention encompasses methods for preventing, managing, treating and/or ameliorating a RSV infection (e.g., acute RSV disease, or a RSV URI and/or LRI), otitis media (preferably, stemming from, caused by or associated with a RSV infection, such as a RSV URI and/or LRI), and/or a symptom or respiratory condition relating thereto (e.g., asthma, wheezing, and/or RAD) in a patient who has proven refractory to therapies other than modified antibodies of the invention but are no longer on these therapies. In certain embodiments, the patients being treated in accordance with the methods of this invention are patients already being treated with antibiotics, anti-virals, anti-fungals, or other biological therapy/immunotherapy. Among these patients are refractory patients, patients who are too young for conventional therapies, and patients with reoccurring RSV URI and/or LRI or otitis media (preferably, stemming from, caused by or associated with a RSV infection, such as a RSV URI and/or LRI) or a symptom or respiratory condition relating thereto (including, but not limited to, asthma, wheezing, RAD, or a combination thereof) despite treatment with existing therapies.

[0309] The present invention encompasses methods for preventing, managing, treating and/or ameliorating a RSV infection (e.g., acute RSV disease, or a RSV URI and/or LRI), otitis media (preferably, stemming from, caused by or associated with a RSV infection, such as a RSV URI and/or LRI), and/or a symptom or respiratory condition relating thereto (e.g., asthma, wheezing, and/or RAD) as an alternative to other conventional therapies. In specific embodiments, the patient being or treated in accordance with the methods of the invention is refractory to other therapies or is susceptible to adverse reactions from such therapies. The patient may be a person with a suppressed immune system (e.g., post-operative patients, chemotherapy patients, and patients with immunodeficiency disease), a person with impaired renal or liver function, the elderly, children, infants, infants born prematurely, persons with neuropsychiatric disorders or those who take psychotropic drugs, persons with histories of seizures, or persons on medication that would negatively interact with conventional agents used to prevent, treat, and/or ameliorate a RSV URI and/or LRI, otitis media (preferably, stemming from, caused by or associated with a RSV infection, such as a RSV URI and/or LRI) or a symptom or respiratory condition relating thereto (including, but not limited to, asthma, wheezing, RAD, or a combination thereof).

[0310] The dosage amounts and frequencies of administration provided herein are encompassed by the terms “effective amount”, “therapeutically effective” and “prophylactically effective.” The dosage and frequency further will typically vary according to factors specific for each patient depending on the specific therapeutic or prophylactic agents administered, the severity and type of infection, the route of administration, as well as age, body weight, response, and the past medical history of the patient. Suitable regimens can be selected by one skilled in the art by considering such factors and by following, for example, dosages reported in the literature and recommended in the Physician's Desk Reference (58^{th} ed., 2004). See Section 5.3 for exemplary dosage amounts and frequencies of administration of the prophylactic and therapeutic agents provided by the invention.

[0311] In specific embodiments, antibodies of the invention are administered to an animal are of a species origin or species reactivity that is the same species as that of the animal. Thus, in a preferred embodiment, human or humanized antibodies, or nucleic acids encoding human or human, are administered to a human patient for therapy or prophylaxis.

[0312] In preferred embodiments, a modified antibody of the invention having an extended in vivo half-life can be used in passive immunotherapy (for either therapy or prophylaxis). Because of the extended half-life, passive immunotherapy or prophylaxis can be accomplished using lower doses and/or less frequent administration of the antibody resulting in fewer side effects, better patient compliance, less costly therapy/prophylaxis, etc. In a preferred embodiment, the therapeutic/prophylactic is an antibody that binds RSV, for example, any one or more of the anti-RSV antibodies described in Section 5.1, supra, (or elsewhere herein), wherein said antibody is a modified antibody. In certain embodiments, unmodified antibodies of the invention can be used in passive immunotherapy, either alone or in combination with a modified antibody of the invention.

### 5.3 Methods of Administration, Frequency, and Dosing of Antibodies

[0313] The present invention further provides for compositions comprising one or more antibodies of the invention (including modified antibodies) for use in the prevention, management, treatment and/or amelioration of a RSV infection (e.g., acute RSV disease, or a RSV URI and/or LRI), otitis media (preferably, stemming from, caused by or associated with a RSV infection, such as a RSV URI and/or LRI), and/or a symptom or respiratory condition relating thereto (e.g., asthma, wheezing, and/or RAD). In a specific embodiment, a composition for use in the prevention, management, treatment and/or amelioration of a RSV infection (e.g., acute RSV disease, or a RSV URI and/or LRI), otitis media (preferably, stemming from, caused by or associated with a RSV infection, such as a RSV URI and/or LRI), and/or a symptom or respiratory condition relating thereto (e.g., asthma, wheezing, and/or RAD) comprises an AFFF, P12f2, P12f4, P11d4, A1e9, A12a6, A13c4, A17d4, A4B4, A8C7, 1X-493L1FR, H3-3F4, M3H9, Y10H6, DG, AFFF(1), 6H8, L1-7E5, L2-15B10, A13a11, A1h5, A4B4(1), A4B4L1FR-S28R (MEDI-524), A4B4-F52S, A17d4(1), A3e2, A14a4, A16b4, A17b5, A17f5, and/or A17h4 antibody. In another specific embodiment, a composition for use in the prevention, management, treatment and/or amelioration of a RSV infection (e.g., acute RSV disease, or a RSV URI and/or LRI), otitis media (preferably, stemming from, caused by or associated with a RSV infection, such as a RSV URI and/or LRI), and/or a symptom or respiratory condition relating thereto (e.g., asthma, wheezing, and/or RAD) comprises an antigen-binding fragment of AFFF, P12f2, P12f4, P11d4, A1e9, A12a6, A13c4, A17d4, A4B4, A8C7, 1X-493L1FR, H3-3F4, M3H9, Y10H6, DG, AFFF(1), 6H8, L1-7E5, L2-15B10, A13a11, A1h5, A4B4(1), A4B4L1FR-S28R (MEDI-524), or A4B4-F52S, A17d4(1), A3e2, A14a4, A16b4, A17b5, A17f5, or A17h4. In certain embodiments, the above-referenced antibodies comprise a modified IgG (e.g., IgG1) constant domain, or FcRn binding fragment thereof (e.g., the Fc domain or hinge-Fc domain), described herein, and preferably the modified IgG constant domain comprises the YTE modification (e.g., MEDI-524-YTE).

[0314] In another embodiment, a composition for use in the prevention, management, treatment and/or amelioration of a RSV infection (e.g., acute RSV disease, or a RSV URI and/or LRI), otitis media (preferably, stemming from, caused by or associated with a RSV infection, such as a RSV URI and/or LRI), and/or a symptom or respiratory condition relating thereto (e.g., asthma, wheezing, and/or RAD) comprises one or more antibodies comprising one or more VH domains having an amino acid sequence of any one of the VH domains listed in Table 2. In another embodiment, a composition for use in the prevention, management, treatment and/or amelioration of a RSV infection (e.g. acute RSV disease, or a RSV URI and/or LRI), otitis media (preferably, stemming from, caused by or associated with a RSV infection, such as a RSV URI and/or LRI), and/or a symptom or respiratory condition relating thereto (e.g., asthma, wheezing, and/or RAD) comprises one or more antibodies comprising one or more VH CDR1s having an amino acid sequence of any one of the VH CDR1s listed in Table 2 and/or Table 3A. In another embodiment, a composition for use in the prevention, management, treatment and/or amelioration of a RSV infection (e.g., acute RSV disease, or a RSV URI and/or LRI), otitis media (preferably, stemming from, caused by or associated with a RSV infection, such as a RSV URI and/or LRI), and/or a symptom or respiratory condition relating thereto (e.g., asthma, wheezing, and/or RAD) comprises one or more antibodies comprising one or more VH CDR2s having an amino acid sequence of any one of the VH CDR2s listed in Table 2 and/or Table 3B. In a preferred embodiment, a composition for use in the prevention, management, treatment and/or amelioration of a RSV infection (e.g., acute RSV disease, or a RSV URI and/or LRI), otitis media (preferably, stemming from, caused by or associated with a RSV infection, such as a RSV URI and/or LRI), and/or a symptom or respiratory condition relating thereto (e.g., asthma, wheezing, and/or RAD) comprises one or more antibodies comprising one or more VH CDR3s having an amino acid sequence of any one of the VH CDR3s listed in Table 2 and/or Table 3C. In certain embodiments, the above-referenced antibodies comprise a modified IgG (e.g., IgG1) constant domain, or FcRn binding fragment thereof (e.g., the Fc domain or hinge-Fc domain), described herein, and preferably the modified IgG constant domain comprises the YTE modification (e.g., MEDI-524-YTE).

[0315] In another embodiment, a composition for use in the prevention, management, treatment and/or amelioration of a RSV infection (e.g., acute RSV disease, or a RSV URI and/or LRI), otitis media (preferably, stemming from, caused by or associated with a RSV infection, such as a RSV URI and/or LRI), and/or a symptom or respiratory condition relating thereto (e.g., asthma, wheezing, and/or RAD) comprises one or more antibodies comprising one or more VL domains having an amino acid sequence of any one of the VL domains listed in Table 2. In another embodiment, a composition for use in the prevention, management, treatment and/or amelioration of a RSV infection (e.g., acute RSV disease, or a RSV URI and/or LRI), otitis media (preferably, stemming from, caused by or associated with a RSV infection, such as a RSV URI and/or LRI), and/or a symptom or respiratory condition relating thereto (e.g., asthma, wheezing, and/or RAD) comprises one or more antibodies comprising one or more VL CDR Is having an amino acid sequence of any one of the VL CDR1s listed in Table 2 or Table 3D. In another embodiment, a composition for use in the prevention, management, treatment and/or amelioration of a RSV infection (e.g., acute RSV disease, or a RSV URI and/or LRI), otitis media (preferably, stemming from, caused by or associated with a RSV infection, such as a RSV URI and/or LRI), and/or a symptom or respiratory condition relating thereto (e.g., asthma, wheezing, and/or RAD) comprises one or more antibodies comprising one or more VL CDR2s having an amino acid sequence of any one of the VL CDR2s listed in Table 2 and/or Table 3E. In a preferred embodiment, a composition for use in the prevention, management, treatment and/or amelioration of a RSV infection (e.g., acute RSV disease, or a RSV URI and/or LRI), otitis media (preferably, stemming from, caused by or associated with a RSV infection, such as a RSV URI and/or LRI), and/or a symptom or respiratory condition relating thereto (e.g., asthma, wheezing, and/or RAD) comprises one or more antibodies comprising one or more VL CDR3s having an amino acid sequence of any one of the VL CDR3s listed in Table 2 and/or Table 3F. In certain embodiments, the above-referenced antibodies comprise a modified IgG (e.g., IgG1) constant domain, or FcRn binding fragment thereof (e.g., the Fc domain or hinge-Fc domain), described herein, and preferably the modified IgG constant domain comprises the YTE modification (e.g., MEDI-524-YTE).

[0316] In another embodiment, a composition for use in the prevention, management, treatment and/or amelioration of a RSV infection (e.g., acute RSV disease, or a RSV URI and/or LRI), otitis media (preferably, stemming from, caused by or associated with a RSV infection, such as a RSV URI and/or LRI), and/or a symptom or respiratory condition relating thereto (e.g., asthma, wheezing, and/or RAD) comprises one or more antibodies comprising one or more VH domains having an amino acid sequence of any one of the VH domains listed in Table 2 and one or more VL domains having an amino acid sequence of any one of the VL domains listed in Table 2. In another embodiment, a composition for use in the prevention, management, treatment and/or amelioration of a RSV infection (e.g., acute RSV disease, or a RSV URI and/or LRI), otitis media (preferably, stemming from, caused by or associated with a RSV infection, such as a RSV URI and/or LRI), and/or a symptom or respiratory condition relating thereto (e.g., asthma, wheezing, and/or RAD) comprises one or more antibodies comprising one or more VH CDR1s having an amino acid sequence of any one of the VH CDR1s listed in Table 2 and/or Table 3A and one or more VL CDR1s having an amino acid sequence of any one of the VL CDR1s listed in Table 2 and/or Table 3D. In another embodiment, a composition for use in the prevention, management, treatment and/or amelioration of a RSV infection (e.g., acute RSV disease, or a RSV URI and/or LRI), otitis media (preferably, stemming from, caused by or associated with a RSV infection, such as a RSV URI and/or LRI), and/or a symptom or respiratory condition relating thereto (e.g., asthma, wheezing, and/or RAD) comprises one or more antibodies comprising one or more VH CDR Is having an amino acid sequence of any one of the VH CDR1s listed in Table 2 and/or Table 3A and one or more VL CDR2s having an amino acid sequence of any one of the VL CDR2s listed in Table 2 and/or Table 3E. In another embodiment, a composition for use in the prevention, management, treatment and/or amelioration of a RSV infection (e.g., acute RSV disease, or a RSV URI and/or LRI), otitis media (preferably, stemming from, caused by or associated with a RSV infection, such as a RSV URI and/or LRI), and/or a symptom or respiratory condition relating thereto (e.g., asthma, wheezing, and/or RAD) comprises one or more antibodies comprising one or more VH CDR1s having an amino acid sequence of any one of the VH CDR1s listed in Table 2 and/or Table 3A and one or more VL CDR3s having an amino acid sequence of any one of the VL CDR3s listed in Table 2 and/or Table 3F. In certain embodiments, the above-referenced antibodies comprise a modified IgG (e.g., IgG1) constant domain, or FcRn binding fragment thereof (e.g., the Fc domain or hinge-Fc domain), described herein, and preferably the modified IgG constant domain comprises the YTE modification (e.g., MEDI-524-YTE).

[0317] In another embodiment, a composition for use in the prevention, management, treatment and/or amelioration of a RSV infection (e.g., acute RSV disease, or a RSV URI and/or LRI), otitis media (preferably, stemming from, caused by or associated with a RSV infection, such as a RSV URI and/or LRI), and/or a symptom or respiratory condition relating thereto (e.g., asthma, wheezing, and/or RAD) comprises one or more antibodies comprising one or more VH CDR2s having an amino acid sequence of any one of the VH CDR2s listed in Table 2 and/or Table 3B and one or more VL CDR1s having an amino acid sequence of any one of the VL CDR1s listed in Table 2 and/or Table 3D. In another embodiment, a composition for use in the prevention, management, treatment and/or amelioration of a RSV infection (e.g., acute RSV disease, or a RSV URI and/or LRI), otitis media (preferably, stemming from, caused by or associated with a RSV infection, such as a RSV URI and/or LRI), and/or a symptom or respiratory condition relating thereto (e.g., asthma, wheezing, and/or RAD) comprises one or more antibodies comprising one or more VH CDR2s having an amino acid sequence of any one of the VH CDR2s listed in Table 2 and/or Table 3B and one or more VL CDR2s having an amino acid sequence of any one of the VL CDR2s listed in Table 2 and/or Table 3E. In another embodiment, a composition for use in the prevention, management, treatment and/or amelioration of a RSV infection (e.g., acute RSV disease, or a RSV URI and/or LRI), otitis media (preferably, stemming from, caused by or associated with a RSV infection, such as a RSV URI and/or LRI), and/or a symptom or respiratory condition relating thereto (e.g., asthma, wheezing, and/or RAD) comprises one or more antibodies comprising one or more VH CDR2s having an amino acid sequence of any one of the VH CDR2s listed in Table 2 and/or Table 3B and one or more VL CDR3s having an amino acid sequence of any one of the VL CDR3s listed in Table 2 and/or Table 3F. In certain embodiments, the above-referenced antibodies comprise a modified IgG (e.g., IgG1) constant domain, or FcRn binding fragment thereof (e.g., the Fc domain or hinge-Fc domain), described herein, and preferably the modified IgG constant domain comprises the YTE modification (e.g., MEDI-524-YTE).

[0318] In another embodiment, a composition for use in the prevention, management, treatment and/or amelioration of a RSV infection (e.g., acute RSV disease, or a RSV URI and/or LRI), otitis media (preferably, stemming from, caused by or associated with a RSV infection, such as a RSV URI and/or LRI), and/or a symptom or respiratory condition relating thereto (e.g., asthma, wheezing, and/or RAD) comprises one or more antibodies comprising one or more VH CDR3s having an amino acid sequence of any one of the VH CDR3s listed in Table 2 and/or Table 3C and one or more VL CDR1s having an amino acid sequence of any one of the VL CDR1s listed in Table 2 and/or Table 3D. In another embodiment, a composition for use in the prevention, management, treatment and/or amelioration of a RSV infection (e.g., acute RSV disease, or a RSV URI and/or LRI), otitis media (preferably, stemming from, caused by or associated with a RSV infection, such as a RSV URI and/or LRI), and/or a symptom or respiratory condition relating thereto (e.g., asthma, wheezing, and/or RAD) comprises one or more antibodies comprising one or more VH CDR3s having an amino acid sequence of any one of the VH CDR3s listed in Table 2 and/or Table 3C and one or more VL CDR2s having an amino acid sequence of any one of the VL CDR2s listed in Table 2 and/or Table 3E. In a preferred embodiment, a composition for use in the prevention, management, treatment and/or amelioration of a RSV infection (e.g., acute RSV disease, or a RSV URI and/or LRI), otitis media (preferably, stemming from, caused by or associated with a RSV infection, such as a RSV URI and/or LRI), and/or a symptom or respiratory condition relating thereto (e.g., asthma, wheezing, and/or RAD) comprises one or more antibodies comprising one or more VH CDR3s having an amino acid sequence of any one of the VH CDR3s listed in Table 2 and/or Table 3C and one or more VL CDR3s having an amino acid sequence of any one of the VL CDR3s listed in Table 2 and/or Table 3F. In a preferred embodiment, a composition for use in the prevention, management, treatment and/or amelioration of a RSV infection (e.g., acute RSV disease, or a RSV URI and/or LRI), otitis media (preferably, stemming from, caused by or associated with a RSV infection, such as a RSV URI and/or LRI), and/or a symptom or respiratory condition relating thereto (e.g., asthma, wheezing, and/or RAD) comprises A4B4L1FR-S28R (MEDI-524) or an antigen-binding fragment thereof. In yet another embodiment, a composition of the present invention comprises one or more fusion proteins of the invention. In certain embodiments, the above-referenced antibodies comprise a modified IgG (e.g., IgG1) constant domain, or FcRn binding fragment thereof (e.g., the Fc domain or hinge-Fc domain), described herein, and preferably the modified IgG constant domain comprises the YTE modification (e.g., MEDI-524-YTE).

[0319] As discussed in more detail below, a composition of the invention may be used either alone or in combination with other compositions. The antibodies may further be recombinantly fused to a heterologous polypeptide at the N— or C-terminus or chemically conjugated (including covalently and non-covalently conjugations) to polypeptides or other compositions. For example, antibodies of the present invention may be recombinantly fused or conjugated to molecules useful as labels in detection assays and effector molecules such as heterologous polypeptides, drugs, radionucleotides, or toxins. See, e.g., PCT publications WO 92/08495; WO 91/14438; WO 89/12624; U.S. Pat. No. 5,314,995; and EP 396,387.

[0320] Antibodies of the present invention may be used, for example, to purify, detect, and target RSV antigens, in both in vitro and in vivo diagnostic and therapeutic methods. For example, the modified antibodies have use in immunoassays for qualitatively and quantitatively measuring levels of the RSV in biological samples such as sputum. See, e.g., Harlow et al., Antibodies: A Laboratory Manual, (Cold Spring Harbor Laboratory Press, 2nd ed. 1988) (incorporated by reference herein in its entirety).

[0321] The invention also provides methods of preventing, managing, treating and/or ameliorating a RSV infection (e.g., acute RSV disease, or a RSV URI and/or LRI), otitis media (preferably, stemming from, caused by or associated with a RSV infection, such as a RSV URI and/or LRI), and/or a symptom or respiratory condition relating thereto (e.g., asthma, wheezing, and/or RAD) by administrating to a subject of an effective amount of an antibody, or pharmaceutical composition comprising an antibody of the invention. In a preferred aspect, an antibody is substantially purified (i.e., substantially free from substances that limit its effect or produce undesired side-effects). The subject administered a therapy is preferably a mammal such as non-primate (e.g., cows, pigs, horses, cats, dogs, rats etc.) or a primate (e.g., a monkey, such as a cynomolgous monkey, or a human). In a preferred embodiment, the subject is a human. In another preferred embodiment, the subject is a human infant or a human infant born prematurely. In another embodiment, the subject is a human with a RSV URI and/or LRI, otitis media stemming from, caused by or associated with a RSV infection, cystic fibrosis, bronchopulmonary dysplasia, congenital heart disease, congenital immunodeficiency or acquired immunodeficiency, a human who has had a bone marrow transplant, or an elderly human.

[0322] Various delivery systems are known and can be used to administer a prophylactic or therapeutic agent (e.g., a modified antibody of the invention), including, but not limited to, encapsulation in liposomes, microparticles, microcapsules, recombinant cells capable of expressing the antibody, receptor-mediated endocytosis (see, e.g., Wu and Wu, J. Biol. Chem. 262:4429-4432 (1987)), construction of a nucleic acid as part of a retroviral or other vector, etc. Methods of administering a prophylactic or therapeutic agent (e.g., an antibody of the invention), or pharmaceutical composition include, but are not limited to, parenteral administration (e.g., intradermal, intramuscular, intraperitoneal, intravenous and subcutaneous), epidural, and mucosal (e.g., intranasal and oral routes). In a specific embodiment, a prophylactic or therapeutic agent (e.g., an antibody of the present invention), or a pharmaceutical composition is administered intranasally, intramuscularly, intravenously, or subcutaneously. The prophylactic or therapeutic agents, or compositions may be administered by any convenient route, for example by infusion or bolus injection, by absorption through epithelial or mucocutaneous linings (e.g., oral mucosa, intranasal mucosa, rectal and intestinal mucosa, etc.) and may be administered together with other biologically active agents. Administration can be systemic or local. In addition, pulmonary administration can also be employed, e.g., by use of an inhaler or nebulizer, and formulation with an aerosolizing agent. See, e.g., U.S. Pat. Nos. 6,019,968, 5,985,320, 5,985,309, 5,934,272, 5,874,064, 5,855,913, 5,290,540, and 4,880,078; and PCT Publication Nos. WO 92/19244, WO 97/32572, WO,97/44013, WO 98/31346, and WO 99/66903, each of which is incorporated herein by reference their entirety. In a specific embodiment, an antibody of the invention, or composition of the invention is administered using Alkermes AIR™ pulmonary drug delivery technology (Alkermes, Inc., Cambridge, Mass.).

[0323] In a specific embodiment, it may be desirable to administer a prophylactic or therapeutic agent, or a pharmaceutical composition of the invention locally to the area in need of treatment. This may be achieved by, for example, and not by way of limitation, local infusion, by topical administration (e.g., by intranasal spray), by injection, or by means of an implant, said implant being of a porous, non-porous, or gelatinous material, including membranes, such as sialastic membranes, or fibers. Preferably, when administering an antibody of the invention, care must be taken to use materials to which the antibody does not absorb.

[0324] In another embodiment, a prophylactic or therapeutic agent, or a composition of the invention can be delivered in a vesicle, in particular a liposome (see Langer, 1990, Science 249:1527-1533; Treat et al., in Liposomes in the Therapy of Infectious Disease and Cancer, Lopez-Berestein and Fidler (eds.), Liss, New York, pp. 353-365 (1989); Lopez-Berestein, ibid., pp. 317-327; see generally ibid.).

[0325] In another embodiment, a prophylactic or therapeutic agent, or a composition of the invention can be delivered in a controlled release or sustained release system. In one embodiment, a pump may be used to achieve controlled or sustained release (see Langer, supra; Sefton, 1987, CRC Crit. Ref. Biomed. Eng. 14:20; Buchwald et al., 1980, Surgery 88:507; Saudek et al., 1989, N. Engl. J. Med. 321:574). In another embodiment, polymeric materials can be used to achieve controlled or sustained release of a prophylactic or therapeutic agent (e.g., an antibodies of the invention) or a composition of the invention (see e.g., Medical Applications of Controlled Release, Langer and Wise (eds.), CRC Pres., Boca Raton, Florida (1974); Controlled Drug Bioavailability, Drug Product Design and Performance, Smolen and Ball (eds.), Wiley, New York (1984); Ranger and Peppas, 1983, J., Macromol. Sci. Rev. Macromol. Chem. 23:61; see also Levy et al., 1985, Science 228:190; During et al., 1989, Ann. Neurol. 25:351; Howard et al., 1989, J. Neurosurg. 7 1:105); U.S. Pat. No. 5,679,377; U.S. Pat. No. 5,916,597; U.S. Pat. No. 5,912,015; U.S. Pat. No. 5,989,463; U.S. Pat. No. 5,128,326; PCT Publication No. WO 99/15154; and PCT Publication No. WO 99/20253. Examples of polymers used in sustained release formulations include, but are not limited to, poly(2-hydroxy ethyl methacrylate), poly(methyl methacrylate), poly(acrylic acid), poly(ethylene-co-vinyl acetate), poly(methacrylic acid), polyglycolides (PLG), polyanhydrides, poly(N-vinyl pyrrolidone), poly(vinyl alcohol), polyacrylamide, poly(ethylene glycol), polylactides (PLA), poly(lactide-co-glycolides) (PLGA), and polyorthoesters. In a preferred embodiment, the polymer used in a sustained release formulation is inert, free of leachable impurities, stable on storage, sterile, and biodegradable. In yet another embodiment, a controlled or sustained release system can be placed in proximity of the therapeutic target, i.e., the nasal passages or lungs, thus requiring only a fraction of the systemic dose (see, e.g., Goodson, in Medical Applications of Controlled Release, supra, vol. 2, pp. 115-138 (1984)).

[0326] Controlled release systems are discussed in the review by Langer (1990, Science 249:1527-1533). Any technique known to one of skill in the art can be used to produce sustained release formulations comprising one or more antibodies of the invention. See, e.g., U.S. Pat. No. 4,526,938, PCT publication WO 91/05548, PCT publication WO 96/20698, Ning et al., 1996, “Intratumoral Radioimmunotherapy of a Human Colon Cancer Xenograft Using a Sustained-Release Gel,” Radiotherapy & Oncology 39:179-189, Song et al., 1995, “Antibody Mediated Lung Targeting of Long-Circulating Emulsions,” PDA Journal of Pharmaceutical Science & Technology 50:372-397, Cleek et al., 1997, “Biodegradable Polymeric Carriers for a bFGF Antibody for Cardiovascular Application,” Pro. Int'l. Symp. Control. Rel. Bioact. Mater. 24:853-854, and Lam et al., 1997, “Microencapsulation of Recombinant Humanized Monoclonal Antibody for Local Delivery,” Proc. Int'l. Symp. Control Rel. Bioact. Mater. 24:759-760, each of which is incorporated herein by reference in their entirety.

[0327] In a specific embodiment, where the composition of the invention is a nucleic acid encoding a prophylactic or therapeutic agent (e.g., an antibody of the invention), the nucleic acid can be administered in vivo to promote expression of its encoded prophylactic or therapeutic agent, by constructing it as part of an appropriate nucleic acid expression vector and administering it so that it becomes intracellular, e.g., by use of a retroviral vector (see U.S. Pat. No. 4,980,286), or by direct injection, or by use of microparticle bombardment (e.g., a gene gun; Biolistic, Dupont), or coating with lipids or cell-surface receptors or transfecting agents, or by administering it in linkage to a homeobox-like peptide which is known to enter the nucleus (see, e.g., Joliot et al., 1991, Proc. Natl. Acad. Sci. USA 88:1864-1868), etc. Alternatively, a nucleic acid can be introduced intracellularly and incorporated within host cell DNA for expression by homologous recombination.

[0328] In a specific embodiment, a composition of the invention comprises one, two or more antibodies of the invention. In another embodiment, a composition of the invention comprises one, two or more antibodies of the invention and a prophylactic or therapeutic agent other than an antibody of the invention. Preferably, the agents are known to be useful for or have been or are currently used for the prevention, management, treatment and/or amelioration of a RSV infection (e.g., acute RSV disease, or a RSV URI and/or LRI), otitis media (preferably, stemming from, caused by or associated with a RSV infection, such as a RSV URI and/or LRI), and/or a symptom or respiratory condition relating thereto (e.g., asthma, wheezing, and/or RAD). In addition to prophylactic or therapeutic agents, the compositions of the invention may also comprise a carrier.

[0329] The compositions of the invention include bulk drug compositions useful in the manufacture of pharmaceutical compositions (e.g., compositions that are suitable for administration to a subject or patient) that can be used in the preparation of unit dosage forms. In a preferred embodiment, a composition of the invention is a pharmaceutical composition. Such compositions comprise a prophylactically or therapeutically effective amount of one or more prophylactic or therapeutic agents (e.g., a modified antibody of the invention or other prophylactic or therapeutic agent), and a pharmaceutically acceptable carrier. Preferably, the pharmaceutical compositions are formulated to be suitable for the route of administration to a subject.

[0330] In a specific embodiment, the term “carrier” refers to a diluent, adjuvant (e.g., Freund's adjuvant (complete and incomplete)), excipient, or vehicle with which the therapeutic is administered. Such pharmaceutical carriers can be sterile liquids, such as water and oils, including those of petroleum, animal, vegetable or synthetic origin, such as peanut oil, soybean oil, mineral oil, sesame oil and the like. Water is a preferred carrier when the pharmaceutical composition is administered intravenously. Saline solutions and aqueous dextrose and glycerol solutions can also be employed as liquid carriers, particularly for injectable solutions. Suitable pharmaceutical excipients include starch, glucose, lactose, sucrose, gelatin, malt, rice, flour, chalk, silica gel, sodium stearate, glycerol monostearate, talc, sodium chloride, dried skim milk, glycerol, propylene, glycol, water, ethanol and the like. The composition, if desired, can also contain minor amounts of wetting or emulsifying agents, or pH buffering agents. These compositions can take the form of solutions, suspensions, emulsion, tablets, pills, capsules, powders, sustained-release formulations and the like. Oral formulation can include standard carriers such as pharmaceutical grades of mannitol, lactose, starch, magnesium stearate, sodium saccharine, cellulose, magnesium carbonate, etc. Examples of suitable pharmaceutical carriers are described in “Remington's Pharmaceutical Sciences” by E. W. Martin. Such compositions will contain a prophylactically or therapeutically effective amount of the antibody, preferably in purified form, together with a suitable amount of carrier so as to provide the form for proper administration to the patient. The formulation should suit the mode of administration.

[0331] In a preferred embodiment, the composition is formulated in accordance with routine procedures as a pharmaceutical composition adapted for intravenous administration to human beings. Typically, compositions for intravenous administration are solutions in sterile isotonic aqueous buffer. Where necessary, the composition may also include a solubilizing agent and a local anesthetic such as lignocamne to ease pain at the site of the injection. Such compositions, however, may be administered by a route other than intravenous.

[0332] Generally, the ingredients of compositions of the invention are supplied either separately or mixed together in unit dosage form, for example, as a dry lyophilized powder or water free concentrate in a hermetically sealed container such as an ampoule or sachette indicating the quantity of active agent. Where the composition is to be administered by infusion, it can be dispensed with an infusion bottle containing sterile pharmaceutical grade water or saline. Where the composition is administered by injection, an ampoule of sterile water for injection or saline can be provided so that the ingredients may be mixed prior to administration.

[0333] The invention also provides that an antibody of the invention is packaged in a hermetically sealed container such as an ampoule or sachette indicating the quantity of antibody. In one embodiment, the antibody is supplied as a dry sterilized lyophilized powder or water free concentrate in a hermetically sealed container and can be reconstituted, e.g., with water or saline to the appropriate concentration for administration to a subject. Preferably, the antibody is supplied as a dry sterile lyophilized powder in a hermetically sealed container at a unit dosage of at least 0.5 mg, at least 1 mg, at least 2 mg, or at least 3 mg, and more preferably at least 5 mg, at least 10 mg, at least 15 mg, at least 25 mg, at least 30 mg, at least 35 mg, at least 45 mg, at least 50 mg, at least 60 mg, or at least 75 mg. The lyophilized antibody can be stored at between 2 and 8° C. in its original container and the antibody can be administered within 12 hours, preferably within 6 hours, within 5 hours, within 3 hours, or within 1 hour after being reconstituted. In an alternative embodiment, a modified antibody is supplied in liquid form in a hermetically sealed container indicating the quantity and concentration of the antibody. Preferably, the liquid form of the antibody is supplied in a hermetically sealed container at least 0.1 mg/ml, at least 0.5 mg/ml, or at least 1 mg/ml, and more preferably at least 2.5 mg/ml, at least 3 mg/ml, at least 5 mg/ml, at least 8 mg/ml, at least 10 mg/ml, at least 15 mg/ml, at least 25 mg/ml, at least 30 mg/ml, or at least 60 mg/ml.

[0334] The compositions of the invention can be formulated as neutral or salt forms. Pharmaceutically acceptable salts include those formed with anions such as those derived from hydrochloric, phosphoric, acetic, oxalic, tartaric acids, etc., and those formed with cations such as those derived from sodium, potassium, ammonium, calcium, ferric hydroxides, isopropylamine, triethylamine, 2-ethylamino ethanol, histidine, procaine, etc.

[0335] The amount of a prophylactic or therapeutic agent (e.g., an antibody of the invention), or a composition of the invention that will be effective in the prevention, management, treatment and/or amelioration of a RSV infection (e.g., acute RSV disease, or a RSV URI and/or LRI), otitis media (preferably, stemming from, caused by or associated with a RSV infection, such as a RSV URI and/or LRI), and/or a symptom or respiratory condition relating thereto (e.g., asthma, wheezing, and/or RAD) can be determined by standard clinical techniques. For example, the dosage of a prophylactic or therapeutic agent, or a composition comprising an antibody of the invention that will be effective in the prevention, management, treatment and/or amelioration of a RSV infection (e.g., acute RSV disease, or a RSV URI and/or LRI), otitis media (preferably, stemming from, caused by or associated with a RSV infection, such as a RSV URI and/or LRI), and/or a symptom or respiratory condition relating thereto (e.g., asthma, wheezing, and/or RAD) can be determined by administering the composition to a cotton rat, measuring the RSV titer after challenging the cotton rat with 10⁵ pfu of RSV and comparing the RSV titer to that obtain for a cotton rat not administered the prophylactic or therapeutic agent, or the composition. Accordingly, a dosage that results in a 2 log decrease or a 99% reduction in RSV titer in the cotton rat challenged with 10⁵ pfu of RSV relative to the cotton rat challenged with 10⁵ pfu of RSV but not administered the prophylactic or therapeutic agent, or the composition is the dosage of the composition that can be administered to a human for the prevention, management, treatment and/or amelioration of a RSV infection (e.g., acute RSV disease, or a RSV URI and/or LRI), otitis media (preferably, stemming from, caused by or associated with a RSV infection, such as a RSV URI and/or LRI), and/or a symptom or respiratory condition relating thereto (e.g., asthma, wheezing, and/or RAD).

[0336] The dosage of a composition which will be effective in the prevention, management, treatment and/or amelioration of a RSV infection (e.g., acute RSV disease, or a RSV URI and/or LRI), otitis media (preferably, stemming from, caused by or associated with a RSV infection, such as a RSV URI and/or LRI), and/or a symptom or respiratory condition relating thereto (e.g., asthma, wheezing, and/or RAD) can be determined by administering the composition to an animal model (e.g., a cotton rat or monkey) and measuring the serum titer, lung concentration or nasal turbinate and/or nasal secretion concentration of a modified antibody that immunospecifically bind to a RSV antigen. Accordingly, a dosage of an antibody or a composition that results in a serum titer of from about 0.1 μg/ml to about 450 μg/ml, and in some embodiments at least 0.1 μg/ml, at least 0.2 μg/ml, at least 0.4 μg/ml, at least 0.5 μg/ml, at least 0.6 μg/ml, at least 0.8 μg/ml, at least 1 μg/ml, at least 1.5 μg/ml, and preferably at least 2 μg/ml, at least 5 μg/ml, at least 10 μg/ml, at least 15 μg/ml, at least 20 μg/ml, at least 25 μg/ml, at least 30 μg/ml, at least 35 μg/ml, at least 40 μg/ml, at least 50 μg/ml, at least 75 μg/ml, at least 100 μg/ml, at least 125 μg/ml, at least 150 μg/ml, at least 200 μg/ml, at least 250 μg/ml, at least 300 μg/ml, at least 350 μg/ml, at least 400 μg/ml, or at least 450 μg/ml can be administered to a human for the prevention, management, treatment and/or amelioration of a RSV infection (e.g., acute RSV disease, or a RSV URI and/or LRI), otitis media (preferably, stemming from, caused by or associated with a RSV infection, such as a RSV URI and/or LRI), and/or a symptom or respiratory condition relating thereto (e.g., asthma, wheezing, and/or RAD). In addition, in vitro assays may optionally be employed to help identify optimal dosage ranges. In some embodiments, the antibody is a modified antibody (e.g., MEDI-524-YTE).

[0337] The precise dose to be employed in the formulation will also depend on the route of administration, and the seriousness of the RSV URI and/or LRI or otitis media, and should be decided according to the judgment of the practitioner and each patient's circumstances. Effective doses may be extrapolated from dose-response curves derived from in vitro or animal model (e.g., the cotton rat or Cynomolgous monkey) test systems.

[0338] For the antibodies of the invention, the dosage administered to a patient is typically 0.0.25 mg/kg to 100 mg/kg of the patient's body weight. In some embodiments, the dosage administered to the patient is about 3 mg/kg to about 60 mg/kg of the patient's body weight. Preferably, the dosage administered to a patient is between 0.025 mg/kg and 20 mg/kg of the patient's body weight, more preferably 1 mg/kg to 15 mg/kg of the patient's body weight. Generally, human antibodies have a longer half-life within the human body than antibodies from other species due to the immune response to the foreign polypeptides. Thus, lower dosages of human antibodies and less frequent administration is often possible. Further, the dosage and frequency of administration of the antibodies of the invention may be reduced by enhancing uptake and tissue penetration (e.g., into the nasal passages and/or lung) of the antibodies by modifications such as, for example, lipidation. In a preferred embodiment, the dosage of A4B4L1FR-S28R (MEDI-524) or antigen-binding fragment thereof (including a modified A4B4L1FR-S28R antibody, such as MEDI-524-YTE) to be administered to is about 60 mg/kg, about 50 mg/kg, about 40 mg/kg, about 30 mg/kg, about 15 mg/kg, about 10 mg/kg, about 5 mg/kg, about 3 mg/kg, about 2 mg/kg, about 1 mg/kg, about 0.80 mg/kg, about 0.50 mg/kg, about 0.40 mg/kg, about 0.20 mg/kg, about 0.10 mg/kg, about 0.05 mg/kg, or about 0.025 mg/kg of the patient's body weight.

[0339] In a specific embodiment, antibodies of the invention, or compositions comprising antibodies of the invention are administered once a month just prior to (e.g., within three months, within two months, within one month) or during the RSV season. In another embodiment, antibodies of the invention, or compositions comprising modified antibodies of the invention are administered every two months just prior to or during the RSV season. In another embodiment, antibodies of the invention, or compositions comprising antibodies of the invention are administered every three months just prior to or during the RSV season. In a preferred embodiment, antibodies of the invention, or compositions comprising antibodies of the invention are administered once just prior to or during the RSV season. In preferred embodiment, antibodies of the invention are administered twice, and most preferably once, during a RSV season. In some embodiments, antibodies of the invention are administered just prior to the RSV season and can optionally administered once during the RSV season. In some embodiments, antibodies of the invention, or compositions comprising antibodies of the invention, are administered every 24 hours for at least three days, at least four days, at least five days, at least six days up to one week just prior to or during an RSV season. In specific embodiments, the daily administration of antibodies of the invention, or compositions comprising antibodies of the invention, occur soon after RSV infection is first recognized (i.e., when the patient has nasal congestion and/or other upper respiratory symptoms), but prior to presentation of clinically significant disease in the lungs (i.e., prior to lower respiratory disease manifestation) such that lower respiratory disease is prevented. In another embodiment, modified antibodies of the invention, or compositions comprising modified antibodies of the invention are administered intranasally once a day for about three (3) days while the patient presents with symptoms of RSV URI during the RSV season. Alternatively, in another embodiment, modified antibodies of the invention, or compositions comprising modified antibodies of the invention are administered intranasally once every other day for at least one week while the patient presents with symptoms of RSV URI during the RSV season. The term “RSV season” refers to the season when RSV infection is most likely to occur. Typically, the RSV season in the northern hemisphere commences in November and lasts through April. Preferably, the antibody comprises the VH and VL domain of A4B4L1FR-S28R (MEDI-524) (FIG. 13) or an antigen-binding fragment thereof. In preferred embodiments, the above referenced antibody is A4B4L1FR-S28R (MEDI-524). In certain embodiments, the above-referenced antibodies comprise a modified IgG (e.g., IgG1) constant domain, or FcRn binding fragment thereof (e.g., the Fc domain or hinge-Fc domain), described herein, and preferably the modified IgG constant domain comprises the YTE modification (e.g., MEDI-524-YTE).

[0340] In one embodiment, approximately 60 mg/kg or less, approximately 45 mg/kg or less, approximately 30 mg/kg or less, approximately 15 mg/kg or less, approximately 10 mg/kg or less, approximately 5 mg/kg or less, approximately 3 mg/kg or less, approximately 2 mg/kg or less, or approximately 1.5 mg/kg or less of an antibody the invention is administered 5 times, 4 times, 3 times, 2 times or, preferably, 1 time during a RSV season to a subject, preferably a human. In some embodiments, an antibody of the invention is administered about 1-12 times during the RSV season to a subject, wherein the doses may be administered as necessary, e.g., weekly, biweekly, monthly, bimonthly, trimonthly, etc., as determined by a physician. In some embodiments, a lower dose (e.g., 5-15 mg/kg) can be administered more frequently (e.g., 3-6 times) during a RSV season. In other embodiments, a higher dose (e.g., 30-60 mg/kg) can be administered less frequently (e.g., 1-3 times) during a RSV season. However, as will be apparent to those in the art, other dosing amounts and schedules are easily determinable and within the scope of the invention. In preferred embodiments, an antibody of the invention comprises one or more VH domains or chains and/or one or more VL domains or chains ion Table 2, and comprises a modified constant domain described, such as modifications at those residues in the IgG constant domain identified herein (see Section 5.1.1). In certain embodiments, the above-referenced antibodies comprise a modified IgG (e.g., IgG1) constant domain, or FcRn binding fragment thereof (e.g., the Fc domain or hinge-Fc domain), described herein, and preferably the modified IgG constant domain comprises the YTE modification (e.g., MEDI-524-YTE).

[0341] In one embodiment, approximately 60 mg/kg or less, approximately 45 mg/kg or less, approximately 30 mg/kg or less, approximately 15 mg/kg or less, approximately 10 mg/kg or less, approximately 5 mg/kg or less, approximately 3 mg/kg or less, approximately 2 mg/kg or less, approximately 1.5 mg/kg or less, approximately 1 mg/kg or less, approximately 0.80 mg/kg or less, approximately 0.50 mg/kg or less, approximately 0.40 mg/kg or less, approximately 0.20 mg/kg or less, approximately 0.10 mg/kg or less, approximately 0.05 mg/kg or less, or approximately 0.025 mg/kg or less of an antibody the invention is administered to a patient five times during a RSV season to a subject, preferably a human, intramuscularly or intranasally. In another embodiment, approximately 60 mg/kg, approximately 45 mg/kg or less, approximately 30 mg/kg or less, approximately 15 mg/kg or less, approximately 10 mg/kg or less, approximately 5 mg/kg or less, approximately 3 mg/kg or less, approximately 2 mg/kg or less, approximately 1.5 mg/kg or less, approximately 1 mg/kg or less, approximately 0.80 mg/kg or less, approximately 0.50 mg/kg or less, approximately 0.40 mg/kg or less, approximately 0.20 mg/kg or less, approximately 0.10 mg/kg or less, approximately 0.05 mg/kg or less, or approximately 0.025 mg/kg or less of an antibody the invention is administered to a patient three times during a RSV season to a subject, preferably a human, intramuscularly or intranasally. In yet another embodiment, approximately 60 mg/kg, approximately 45 mg/kg or less, approximately 30 mg/kg or less, approximately 15 mg/kg or less, approximately 10 mg/kg or less, approximately 5 mg/kg or less, approximately 3 mg/kg or less, approximately 2 mg/kg or less, approximately 1.5 mg/kg or less, approximately 1 mg/kg or less, approximately 0.80 mg/kg or less, approximately 0.50 mg/kg or less, approximately 0.40 mg/kg or less, approximately 0.20 mg/kg or less, approximately 0.10 mg/kg or less, approximately 0.05 mg/kg or less, or approximately 0.025 mg/kg or less of an antibody the invention is administered two times and most preferably one time during a RSV season to a subject, preferably a human, intramuscularly or intranasally. In another embodiment, approximately 1 mg/kg or less, approximately 0.1 mg/kg or less, approximately 0.05 mg/kg or less or approximately 0.025 mg/kg of a modified antibody of the invention is administered once a day for at least three days or alternatively, every other day for at least one week during a RSV season to a subject, preferably human, intranasally. Preferably, the modified antibody comprises the VH and VL domain of A4B4L1FR-S28R (MEDI-524) (FIG. 13) or an antigen-binding fragment thereof. In certain embodiments, the above-referenced antibodies comprise a modified IgG (e.g., IgG1) constant domain, or FcRn binding fragment thereof (e.g., the Fc domain or hinge-Fc domain), described herein, and preferably the modified IgG constant domain comprises the YTE modification (e.g., MEDI-524-YTE).

[0342] In a specific embodiment, approximately 60 mg/kg, approximately 45 mg/kg or less, approximately 30 mg/kg or less, approximately 15 mg/kg or less, approximately 10 mg/kg or less, approximately 5 mg/kg or less, approximately 3 mg/kg or less, approximately 2 mg/kg or less, approximately 1.5 mg/kg or less, approximately 1 mg/kg or less, approximately 0.80 mg/kg or less, approximately 0.50 mg/kg or less, approximately 0.40 mg/kg or less, approximately 0.20 mg/kg or less, approximately 0.10 mg/kg or less, approximately 0.05 mg/kg or less, or approximately 0.025 mg/kg or less of an antibody the invention in a sustained release formulation is administered to a subject, preferably a human, to prevent, manage, treat and/or ameliorate a RSV infection (e.g., acute RSV disease, or a RSV URI and/or LRI), otitis media (preferably, stemming from, caused by or associated with a RSV infection, such as a RSV URI and/or LRI), and/or a symptom or respiratory condition relating thereto (e.g., asthma, wheezing, and/or RAD). In another specific embodiment, an approximately 60 mg/kg, approximately 45 mg/kg or less, approximately 30 mg/kg or less, approximately 15 mg/kg or less, approximately 10 mg/kg or less, approximately 5 mg/kg or less, approximately 3 mg/kg or less, approximately 2 mg/kg or less, approximately 1.5 mg/kg or less, approximately 1 mg/kg or less, approximately 0.80 mg/kg or less, approximately 0.50 mg/kg or less, approximately 0.40 mg/kg or less, approximately 0.20 mg/kg or less, approximately 0.10 mg/kg or less, approximately 0.05 mg/kg or less, or approximately 0.025 mg/kg or less bolus of an antibody the invention not in a sustained release formulation is administered to a subject, preferably a human, to prevent, manage, treat and/or ameliorate a RSV infection (e.g., acute RSV disease, or a RSV URI and/or LRI), otitis media (preferably, stemming from, caused by or associated with a RSV infection, such as a RSV URI and/or LRI), and/or a symptom or respiratory condition relating thereto (e.g., asthma, wheezing, and/or RAD), and after a certain period of time, approximately 60 mg/kg, approximately 45 mg/kg or less, approximately 30 mg/kg or less, approximately 15 mg/kg or less, approximately 10 mg/kg or less, approximately 5 mg/kg or less, approximately 3 mg/kg or less, approximately 2 mg/kg or less, approximately 1.5 mg/kg or less, approximately 1 mg/kg or less, approximately 0.80 mg/kg or less, approximately 0.50 mg/kg or less, approximately 0.40 mg/kg or less, approximately 0.20 mg/kg or less, approximately 0.10 mg/kg or less, approximately 0.05 mg/kg or less, or approximately 0.025 mg/kg or less of the invention in a sustained release is administered to said subject (e.g., intranasally or intramuscularly) two, three or four times (preferably one time) during a RSV season. In accordance with this embodiment, a certain period of time can be 1 to 5 days, a week, two weeks, or a month. In another embodiment, approximately 60 mg/kg, approximately 45 mg/kg or less, approximately 30 mg/kg or less, approximately 15 mg/kg or less, approximately 10 mg/kg or less, approximately 5 mg/kg or less, approximately 3 mg/kg or less, approximately 2 mg/kg or less, approximately 1.5 mg/kg or less, approximately 1 mg/kg or less, approximately 0.80 mg/kg or less, approximately 0.50 mg/kg or less, approximately 0.40 mg/kg or less, approximately 0.20 mg/kg or less, approximately 0.10 mg/kg or less, approximately 0.05 mg/kg or less, or approximately 0.025 mg/kg or less of a modified antibody of the invention in a sustained release formulation is administered to a subject, preferably a human, intramuscularly or intranasally two, three or four times (preferably one time) during a RSV season to prevent, manage, treat and/or ameliorate a RSV infection (e.g., acute RSV disease, or a RSV URI and/or LRI), otitis media (preferably, stemming from, caused by or associated with a RSV infection, such as a RSV URI and/or LRI), and/or a symptom or respiratory condition relating thereto (e.g., asthma, wheezing, and/or RAD). Preferably, the antibody is A4B4L1FR-S28 or an antigen-binding fragment thereof. In certain embodiments, the above-referenced antibodies comprise a modified IgG (e.g., IgG1) constant domain, or FcRn binding fragment thereof (e.g., the Fc domain or hinge-Fc domain), described herein, and preferably the modified IgG constant domain comprises the YTE modification (e.g., MEDI-524-YTE).

[0343] In another embodiment, approximately 60 mg/kg, approximately 45 mg/kg or less, approximately 30 mg/kg or less, approximately 15 mg/kg or less, approximately 10 mg/kg or less, approximately 5 mg/kg or less, approximately 3 mg/kg or less, approximately 2 mg/kg or less, approximately 1.5 mg/kg or less, approximately 1 mg/kg or less, approximately 0.80 mg/kg or less, approximately 0.50 mg/kg or less, approximately 0.40 mg/kg or less, approximately 0.20 mg/kg or less, approximately 0.10 mg/kg or less, approximately 0.05 mg/kg or less, or approximately 0.025 mg/kg or less of one or more antibodies of the invention is administered intranasally to a subject to prevent, manage, treat and/or ameliorate a RSV infection (e.g., acute RSV disease, or a RSV URI and/or LRI), otitis media (preferably, stemming from, caused by or associated with a RSV infection, such as a RSV URI and/or LRI), and/or a symptom or respiratory condition relating thereto (e.g., asthma, wheezing, and/or RAD). In one embodiment, antibodies of the invention are administered intranasally to a subject to treat URI and to prevent lower respiratory tract infection and/or RSV disease. Preferably, the antibody is A4B4L1FR-S28 or an antigen-binding fragment thereof. In certain embodiments, the above-referenced antibodies comprise a modified IgG (e.g., IgG1) constant domain, or FcRn binding fragment thereof (e.g., the Fc domain or hinge-Fc domain), described herein, and preferably the modified IgG constant domain comprises the YTE modification (e.g., MEDI-524-YTE).

[0344] In certain embodiments, a single dose of a modified antibody of the invention (preferably a MEDI-524 or a modified MEDI-524 antibody, such as MEDI-524-YTE) is administered to a patient, wherein the dose is selected from the group consisting of about 0.025 mg/kg, about 0.05 mg/kg, about 0.10 mg/kg, about 0.20 mg/kg, about 0.40 mg/kg, about 0.50 mg/kg, about 0.80 mg/kg, or about 1 mg/kg, about 3 mg/kg, about 5 mg/kg, about 10 mg/kg, about 15 mg/kg, about 20 mg/kg, about 25 mg/kg, about 30 mg/kg, about 35 mg/kg, about 40 mg/kg, about 45 mg/kg, about 50 mg/kg, about 55 mg/kg, about 60 mg/kg, about 65 mg/kg, about 70 mg/kg, or about 75 mg/kg. In specific embodiments, a single dose of a modified antibody of the invention (preferably a MEDI-524 or modified MDI-524 antibody, such as MEDI-524-YTE) is administered once per year or once during the course of a RSV season, or once within 3 months, 2 months, or 1 month prior to a RSV season. In certain embodiments, the above-referenced antibodies comprise a modified IgG (e.g., IgG1) constant domain, or FcRn binding fragment thereof (e.g., the Fc domain or hinge-Fc domain), described herein, and preferably the modified IgG constant domain comprises the YTE modification (e.g., MEDI-524-YTE).

[0345] In some embodiments, a single dose of an antibody of the invention (preferably a MEDI-524 or a modified MDI-524 antibody, such as MEDI-524-YTE) is administered to a patient two, three, four, five, six, seven, eight, nine, ten, eleven, twelve times, thirteen, fourteen, fifteen, sixteen, seventeen, eighteen, nineteen, twenty, twenty-one, twenty-two, twenty-three, twenty-four, twenty five, or twenty six at bi-weekly (e.g., about 14 day) intervals over the course of a year (or alternatively over the course of a RSV season), wherein the dose is selected from the group consisting of about 0.025 mg/kg, about 0.05 mg/kg, about 0.10 mg/kg, about 0.20 mg/kg, about 0.40 mg/kg, about 0.50 mg/kg, about 0.80 mg/kg, or about 1 mg/kg, about 3 mg/kg, about 5 mg/kg, about 10 mg/kg, about 15 mg/kg, about 20 mg/kg, about 25 mg/kg, about 30 mg/kg, about 35 mg/kg, about 40 mg/kg, about 45 mg/kg, about 50 mg/kg, about 55 mg/kg, about 60 mg/kg, about 65 mg/kg, about 70 mg/kg, about 75 mg/kg, or a combination thereof (i. e., each dose monthly dose may or may not be identical). In certain embodiments, the above-referenced antibodies comprise a modified IgG (e.g., IgG1) constant domain, or FcRn binding fragment thereof (e.g., the Fc domain or hinge-Fc domain), described herein, and preferably the modified IgG constant domain comprises the YTE modification (e.g., MEDI-524-YTE).

[0346] In another embodiment, a single dose of an antibody of the invention (preferably a MEDI-524 or a modified MDI-524 antibody, such as MEDI-524-YTE) is administered to patient two, three, four, five, six, seven, eight, nine, ten, eleven, or twelve times at about monthly (e.g., about 30 day) intervals over the course of a year (or alternatively over the course of a RSV season), wherein the dose is selected from the group consisting of about 0.025 mg/kg, about 0.05 mg/kg, about 0.10 mg/kg, about 0.20 mg/kg, about 0.40 mg/kg, about 0.50 mg/kg, about 0.80 mg/kg, or about I mg/kg, about 3 mg/kg, about 5 mg/kg, about 10 mg/kg, about 15 mg/kg, about 20 mg/kg, about 25 mg/kg, about 30 mg/kg, about 35 mg/kg, about 40 mg/kg, about 45 mg/kg, about 50 mg/kg, about 55 mg/kg, about 60 mg/kg, about 65 mg/kg, about 70 mg/kg, about 75 mg/kg, or a combination thereof (i.e., each dose monthly dose may or may not be identical). In certain embodiments, the above-referenced antibodies comprise a modified IgG (e.g., IgG1) constant domain, or FcRn binding fragment thereof (e.g., the Fc domain or hinge-Fc domain), described herein, and preferably the modified IgG constant domain comprises the YTE modification (e.g., MEDI-524-YTE).

[0347] In one embodiment, a single dose of an antibody of the invention (preferably a MEDI-524 or a modified MDI-524 antibody, such as MEDI-524-YTE) is administered to a patient two, three, four, five, or six times at about bi-monthly (e.g., about 60 day) intervals over the course of a year (or alternatively over the course of a RSV season), wherein the dose is selected from the group consisting of about 0.025 mg/kg, about 0.05 mg/kg, about 0.10 mg/kg, about 0.20 mg/kg, about 0.40 mg/kg, about 0.50 mg/kg, about 0.80 mg/kg, or about 1 mg/kg, about 3 mg/kg, about 5 mg/kg, about 10 mg/kg, about 15 mg/kg, about 20 mg/kg, about 25 mg/kg, about 30 mg/kg, about 35 mg/kg, about 40 mg/kg, about 45 mg/kg, about 50 mg/kg, about 55 mg/kg, about 60 mg/kg, about 65 mg/kg, about 70 mg/kg, about 75 mg/kg, or a combination thereof (i.e., each bimonthly dose may or may not be identical). In certain embodiments, the above-referenced antibodies comprise a modified IgG (e.g., IgG1) constant domain, or FcRn binding fragment thereof (e.g., the Fc domain or hinge-Fc domain), described herein, and preferably the modified IgG constant domain comprises the YTE modification (e.g., MEDI-524-YTE).

[0348] In some embodiments, a single dose of an antibody of the invention (preferably a MEDI-524 or a modified MDI-524 antibody, such as MEDI-524-YTE) is administered to a patient two, three, or four times at about tri-monthly (e.g., about 120 day) intervals over the course of a year (or alternatively over the course of a RSV season), wherein the dose is selected from the group consisting of about 0.025 mg/kg, about 0.05 mg/kg, about 0.10 mg/kg, about 0.20 mg/kg, about 0.40 mg/kg, about 0.50 mg/kg, about 0.80 mg/kg, or about 1 mg/kg, about 3 mg/kg, about 5 mg/kg, about 10 mg/kg, about 15 mg/kg, about 20 mg/kg, about 25 mg/kg, about 30 mg/kg, about 35 mg/kg, about 40 mg/kg, about 45 mg/kg, about 50 mg/kg, about 55 mg/kg, about 60 mg/kg, about 65 mg/kg, about 70 mg/kg, about 75 mg/kg, or a combination thereof (i.e., each tri-monthly dose may or may not be identical). In certain embodiments, the above-referenced antibodies comprise a modified IgG (e.g., IgG1) constant domain, or FcRn binding fragment thereof (e.g., the Fc domain or hinge-Fc domain), described herein, and preferably the modified IgG constant domain comprises the YTE modification (e.g., MEDI-524-YTE).

[0349] In certain embodiments, the route of administration for a dose of an antibody of the invention to a patient is intranasal, intramuscular, intravenous, or a combination thereof, but other routes described herein are also acceptable. Each dose may or may not be administered by an identical route of administration). In some embodiments, an antibody of the invention may be administered via multiple routes of administration simultaneously or subsequently to other doses of the same or a different antibody of the invention.

[0350] In certain embodiments, antibodies of the invention are administered prophylactically to a subject (e.g., an infant, an infant born prematurely, an immunocompromised subject, a medical worker, or an elderly subject). Antibodies of the invention can be prophylactically administered to a subject so as to prevent a RSV infection from being transmitted from one individual to another, or to lessen the infection that is transmitted. In some embodiments, the subject has been exposed to (and may or may not be asymptomatic) or is likely to be exposed to another individual having RSV infection (e.g., acute RSV disease, or a RSV URI and/or LRI). For example, said subjects include, but are not limited to, a child in the same school or daycare as another RSV-infected child or other RSV-infected individual, an elderly person in a nursing home as an other RSV-infected individual, or an individual in the same household as a RSV infected child or other RSV-infected individual, medical staff at a hospital working with RSV-infected patients, etc. Preferably, the antibody administered prophylactically to the subject is administered intranasally, but other routes of administration described herein are acceptable. In certain preferred embodiments, the antibody of the invention is MEDI-524 or MEDI-524-YTE. In some embodiments, the antibody of the invention is administered (e.g., intranasally) at a dose of about 0.025 mg/kg, about 0.05 mg/kg, about 0.10 mg/kg, about 0.20 mg/kg, about 0.40 mg/kg, about 0.50 mg/kg, about 0.80 mg/kg, about 1 mg/kg, about 2 mg/kg, about 3 mg/kg, about 5 mg/kg, about 10 mg/kg, about 15 mg/kg, about 30 mg/kg, about 40 mg/kg, or about 50 mg/kg. Lower dosages and less frequent administration is preferred, for example, intranasal administration (or other route) once every 2-4 hours, 4-6 hours, 6-8 hours, 8-10 hours, 10-12 hours, 12-14 hours, 14-16 hours, 16-18 hours, 18-20-22 hours, 22-24 hours (preferably once or twice per day) for about 3 days, about 5 days or about 7 days or as otherwise needed after potential or actual exposure to the RSV-infected individual. Any antibody of the invention described herein may be used, and in certain embodiments the antibody comprises a modified IgG (e.g., IgG1) constant domain, or FcRn binding fragment thereof (e.g., the Fc domain or hinge-Fc domain), and preferably the modified IgG constant domain comprises the YTE modification (e.g., MEDI-524-YTE). In certain embodiments, the antibody is administered as a liquid formulation composition, preferably intranasally.

### 5.3.1 Liquid Formulations Comprising Antibodies of the Invention

[0351] The present invention provides liquid formulations of antibodies of the invention, which formulations exhibit, in the absence of surfactant, inorganic salts, and/or other excipients, stability and low to undetectable levels of antibody fragmentation and/or aggregation, and very little to no loss of biological activities of the antibody or antibody fragment during manufacture, preparation, transportation, and storage. The liquid formulations of the present invention facilitate the administration of the antibodies of the invention for the prevention, management, treatment and/or amelioration of a RSV infection (e.g., acute RSV disease, or a RSV URI and/or LRI), otitis media (preferably, stemming from, caused by or associated with a RSV infection, such as a RSV URI and/or LRI), and/or a symptom or respiratory condition relating thereto (e.g., asthma, wheezing, and/or RAD). In particular, the liquid formulations of the present invention enable a healthcare professional to quickly administer a sterile dosage of an antibody of the invention without having to accurately and aseptically reconstitute the antibody prior to administration as required for the lyophilized dosage form. Such liquid formulations can be manufactured more easily and cost effectively than lyophilized formulations since liquid formulations do not require a prolonged drying step, such as lyophilization, freeze-drying, etc. In a preferred embodiment, the liquid formulations are made by a process in which the antibody being formulated is in an aqueous phase throughout the purification and formulation process. Preferably, the liquid formulations are made by a process that does not include a drying step, for example, but not by way of limitation, a lyophilization, freeze-drying, spray-drying, or air-drying step. Liquid formulations that can be used in the methods of the invention are described in co-owned and co-pending U.S. Ser. No.10/461,863, which is herein incorporated by reference in its entirety.

[0352] All liquid formulations of antibodies of the invention that immunospecifically bind to a RSV antigen described herein collectively referred to as “liquid formulations of the invention,” “antibody liquid formulations of the invention,” “liquid formulations of antibodies of the invention,” “liquid formulations of anti-RSV antibodies,” and analogous terms.

[0353] The present invention provides liquid antibody formulations which are substantially free of surfactants and/or inorganic salts. The present invention also provides liquid antibody formulations which are substantially free of surfactants and other excipients. The present invention also provides liquid antibody formulations which are substantially free of surfactants, inorganic salts and other excipients. The present invention further provides liquid antibody formulations which do not comprise other ingredients except for water or suitable solvents and an antibody of the invention. In a specific embodiment, such antibody formulations are homogeneous.

[0354] In one embodiment, a liquid formulation of the invention comprises, in an aqueous carrier, about 15 mg/ml of an antibody of the invention and histidine, wherein the liquid formulation is substantially free of surfactants and inorganic salts. In accordance with this embodiment, the liquid formulation may further comprises glycine and/or other excipients. In another embodiment, a liquid formulation of the invention comprises, in an aqueous carrier, about 15 mg/ml of an antibody of the invention and histidine, wherein the liquid formulation is substantially free of surfactants, inorganic salts and other excipients.

[0355] In one embodiment, the concentration of an antibody of the invention which is included in the liquid formulations of the invention is about 15 mg/ml, about 20 mg/ml, about 25 mg/ml, about 30 mg/ml, about 35 mg/ml, about 40 mg/ml, about 45 mg/ml, about 50 mg/ml, about 55 mg/ml, about 60 mg/ml, about 65 mg/ml, about 70 mg/ml, about 75 mg/ml, about 80 mg/ml, about 85 mg/ml, about 90 mg/ml, about 95 mg/ml, about 100 mg/ml, about 105 mg/ml, about 110 mg/ml, about 115 mg/ml, about 120 mg/ml, about 125 mg/ml, about 130 mg/ml, about 135 mg/ml, about 140 mg/ml, about 150 mg/ml, about 200 mg/ml, about 250 mg/ml, or about 300 mg/ml. In another embodiment, the concentration of an antibody of the invention which is included in the liquid formulations of the invention is about 15 mg/ml to about 300 mg/ml, about 40 mg/ml to about 300 mg/ml, about 50 mg/ml to about 300 mg/ml, about 75 mg/ml to about 300 mg/ml, or about 100 mg/ml to about 300 mg/ml.

[0356] The liquid formulations of the invention can be used to prevent, manage, treat and/or ameliorate a RSV infection (e.g., acute RSV disease, or a RSV URI and/or LRI), otitis media (preferably, stemming from, caused by or associated with a RSV infection, such as a RSV URI and/or LRI), and/or a symptom or respiratory condition relating thereto (e.g., asthma, wheezing, and/or RAD). In one embodiment, a liquid formulation of the invention comprises an antibody listed in Table 2 or Table 3, or a derivative, analogue, or fragment thereof that immunospecifically binds to a RSV antigen. In a preferred embodiment, a liquid formulation of the invention comprises A4B4-L1 S28R (MEDI-524). In another preferred embodiment, a liquid formulation of the invention comprises an antibody of the invention that comprises a modified IgG (e.g., IgG1) constant domain, or FcRn binding fragment thereof (e.g., the Fc domain or hinge-Fc domain), described herein, and preferably the modified IgG constant domain comprises the YTE modification (e.g., MEDI-524-YTE).

[0357] The liquid formulations of the invention can also be used for diagnostic purposes to detect, diagnose, or monitor a RSV infection. Accordingly, the invention includes liquid formulations comprising antibodies or fragments thereof that immunospecifically bind to a RSV antigen conjugated or fused to a detectable agent or label can be used to detect, diagnose, or monitor a RSV infection.

[0358] In one embodiment, the concentration of histidine which is included in the liquid formulations of the invention ranges from about 1 mM to about 100 mM, about 10 mM to about 50 mM, about 20 mM to about 30 mM, or about 23 mM to about 27 mM. In another embodiment, the concentration of histidine which is included in the liquid formulations of the invention is 1 mM or more, 10 mM or more, 15 mM or more, 20 mM or more, 25 mM or more, 30 mM or more, 35 mM or more, 40 mM or more, 45 mM or more, 50 mM or more, 55 mM or more, 60 mM or more, 65 mM or more, 70 mM or more, 75 mM or more, 80 mM or more, 85 mM or more, 90 mM or more, 95 mM or more or 100 mM or more. In a preferred embodiment, the concentration of histidine that is included in the liquid formulation of the invention is about 25 mM. Histidine can be in the form of L-histidine, D-histidine, or a mixture thereof, but L-histidine is the most preferable. Histidine can be also in the form of hydrates. Histidine may be used in a form of pharmaceutically acceptable salt, such as hydrochloride (e.g., monohydrochloride and dihydrochloride), hydrobromide, sulfate, acetate, etc. The purity of histidine should be at least 98%, preferably at least 99%, and most preferably at least 99.5%.

[0359] The pH of the formulation should not be equal to the isoelectric point of the particular antibody to be used in the formulation and may range from about 5.0 to about 7, preferably about 5.5 to about 6.5, more preferably about 5.8 to about 6.2, and most preferably about 6.0.

[0360] In addition to histidine and an antibody of the invention, the liquid formulations of the present invention may further comprise glycine. In one embodiment, the concentration of glycine which is included in a liquid formulation of the invention is about 0.1 mM to about 100 mM. In another embodiment, the concentration of glycine which is included in a liquid formulation of the invention is less than 100 mM, less than 50 mM, less than 3.0 mM, less than 2.0 mM, or less than 1.8 mM. In a preferred embodiment, the concentration of glycine which is included in a liquid formulation of the invention is 1.6 mM. The amount of glycine in the formulation should not cause a significant buffering effect so that antibody precipitation at its isoelectric point can be avoided. Glycine may be also used in a form of pharmaceutically acceptable salt, such as hydrochloride, hydrobromide, sulfate, acetate, etc. The purity of glycine should be at least 98%, preferably at least 99%, and most preferably 99.5%. In a specific embodiment, glycine is included in the liquid formulations of the present invention.

[0361] Optionally, the liquid formulations of the present invention may further comprise other excipients, such as saccharides (e.g., sucrose, mannose, trehalose, etc.) and polyols (e.g., mannitol, sorbitol, etc.). In one embodiment, the other excipient is a saccharide. In a specific embodiment, the saccharide is sucrose, which is at a concentration ranging from between about 1% to about 20%, preferably about 5% to about 15%, and more preferably about 8% to 10%. In another embodiment, the other excipient is a polyol. Preferably, however, the liquid formulations of the present invention do not contain mannitol. In a specific embodiment, the polyol is polysorbate (e.g., Tween 20), which is at a concentration ranging from between about 0.001% to about 1%, preferably, about 0.01% to about 0.1%.

[0362] The liquid formulations of the present invention exhibit stability at the temperature ranges of 38° C.-42° C. for at least 60 days and, in some embodiments, not more than 120 days, of 20° C.-24° C. for at least 1 year, of 2° C.-8° C. (in particular, at 4° C.) for at least 3 years, at least 4 years, or at least 5 years and at -20 ° C for at least 3 years, at least 4 years, or at least 5 years, as assessed by high performance size exclusion chromatography (HPSEC). Namely, the liquid formulations of the present invention have low to undetectable levels of aggregation and/or fragmentation, as defined herein, after the storage for the defined periods as set forth above. Preferably, no more than 5%, no more than 4%, no more than 3%, no more than 2%, no more than 1%, and most preferably no more than 0.5% of the antibody or antibody fragment forms an aggregate as measured by HPSEC, after the storage for the defined periods as set forth above. Furthermore, liquid formulations of the present invention exhibit almost no loss in biological activities of the antibody or antibody fragment during the prolonged storage under the condition described above, as assessed by various immunological assays including, but not limited to, enzyme-linked immunosorbent assay (ELISA) and radioimmunoassay to measure the ability of an antibody or antibody fragment to immunospecifically bind to a RSV antigen, and by a C3a/C4a assay to measure the complement activating ability of the antibody. In a specific embodiment, the liquid formulations exhibit very little to no loss of the biological activity(ies) of the antibodies or antibody fragments of the formulation compared to the reference antibodies as measured by antibody binding assays such as, e.g., ELISAs. The liquid formulations of the present invention retain after the storage for the above-defined periods more than 80%, more than 85%, more than 90%, more than 95%, more than 98%, more than 99%, or more than 99.5% of the initial biological activities of the formulation prior to the storage.

[0363] The liquid formulations of the present invention can be prepared as unit dosage forms. For example, a unit dosage per vial may contain 0.1 ml, 0.25 ml, 0.5 ml, 1 ml, 2 ml, 3 ml, 4 ml, 5 ml, 6 ml, 7 ml, 8 ml, 9 ml, 10 ml, 15 ml, or 20 ml of differnet concentrations of an antibody of the invention ranging from about 15 mg/ml to about 300 mg/ml. If necessary, these preparations can be adjusted to a desired concentration by adding a sterile diluent to each vial.

[0364] The invention encompasses stable liquid formulations comprising a single antibody of the invention, with the proviso that said antibody is not palivizumab. The invention also encompasses stable liquid formulations comprising two or more antibodies of the invention. In one embodiment, a stable liquid formulation of the invention comprises two or more antibodies of the invention, wherein one of the antibodies is palivizumab or a fragment thereof. In an alternative embodiment, a stable liquid formulation of the invention comprises two or more antibodies of the invention, with the proviso that the antibodies do not include palivizumab or a fragment thereof.

[0365] The present invention also provides kits comprising the liquid formulations of antibodies of the invention for use by, e.g., a healthcare professional. The present invention also provides methods of preventing, managing, treating and/or ameliorating a RSV infection (e.g., acute RSV disease, or a RSV URI and/or LRI), otitis media (preferably, stemming from, caused by or associated with a RSV infection, such as a RSV URI and/or LRI), and/or a symptom or respiratory condition relating thereto (e.g., asthma, wheezing, and/or RAD) by administering the liquid formulations of the present invention. The liquid formulations of the present invention can also be used to diagnose, detect or monitor a RSV infection, such as an acute RSV disease, a RSV URI, or a RSV LRI).

[0366] In certain embodiments, a liquid formulation of the invention and one or more other therapies (e.g., one or more other prophylactic or therapeutic agents) useful for prevention, management, treatment and/or amelioration of a RSV infection (e.g., acute RSV disease, or a RSV URI and/or LRI) are administered in a cycle of less than about 3 weeks, about once every two weeks, about once every 10 days or about once every week. One cycle can comprise the administration of a therapy (e.g., a therapeutic or prophylactic agent) by infusion over about 90 minutes every cycle, about 1 hour every cycle, about 45 minutes every cycle. Each cycle can comprise at least 1 week of rest, at least 2 weeks of rest, at least 3 weeks of rest. The number of cycles administered is from about 1 to about 12 cycles, more typically from about 2 to about 10 cycles, and more typically from about 2 to about 8 cycles. In certain embodiments, the liquid formulation of the invention is in a cycle of hours (e.g., about every 1 to 6 hours, 6 to 12 hours, 12 to 18 hours, or 18-24 hours) to days (e.g., daily, every other day, every third day, every fourth day, every fifth day, every sixth day or every seventh day). In certain embodiments, the liquid formulations of the invention are delivered intranasally. In some embodiments the antibody is an unmodified antibody of the invention. In other embodiments, the antibody comprise a modified IgG (e.g., IgG1) constant domain, or FcRn binding fragment thereof (e.g., the Fc domain or hinge-Fc domain), described herein, and preferably the modified IgG constant domain comprises the YTE modification (e.g., MEDI-524-YTE).

### 5.3.2 Methods of Preparing Liquid Formulations of the Invention

[0367] The present invention also provides methods for preparing liquid formulations of antibodies, in particular, those listed in Table 2 or Table 3 (or other antibodies of the invention described herein), or derivatives, analogues, or fragments thereof that immunospecifically bind to a RSV antigen. FIG. 34 is a schematic diagram showing the outline for preparing purified anti-RSV antibodies. The methods for preparing liquid formulations of the present invention comprise: concentrating a fraction containing the purified antibody or a fragment to a final antibody or fragment concentration of from about 15 mg/ml, about 20 mg/ml, about 30 mg/ml, about 40 mg/ml, about 50 mg/ml, about 60 mg/ml, about 70 mg/ml, about 80 mg/ml, about 90 mg/ml, about 100 mg/ml, about 110 mg/ml, about 125 mg/ml, about 150 mg/ml, about 200 mg/ml, about 250 mg/ml, or about 300 mg/ml using a semipermeable membrane with an appropriate molecular weight (MW) cutoff (e.g., 30 kD cutoff for whole antibody molecules and F(ab′)₂ fragments; and 10 kD cutoff for antibody fragments, such as Fab fragments) and difiltrating the concentrated antibody fraction into the formulation buffer using the same membrane. Conditioned medium containing antibody or a fragment thereof that immunospecifically binds to a RSV antigen is subjected to CUNO filtration and the filtered antibody is subjected to HS50 cation exchange chromatography. The fraction from the HS50 cation exchange chromatography is then subjected to rProtein A affinity chromatography followed by low pH treatment. Following low pH treatment, the antibody fraction is subject to super Q 650 anion exchange chromatography and then nanofiltration. The fraction of the antibody obtained after nanofiltration is then subjected to diafiltration to concentrate the antibody fraction into the formulation buffer using the same membrane.

[0368] The formulation buffer of the present invention comprises histidine at a concentration ranging from about 1 mM to about 100 mM, about 10 mM to about 50 mM, about 20 mM to about 30 mM, or about 23 mM to about 27 mM. Preferably, the formulation buffer of the present invention comprises histidine at a concentration of about 25 mM. The formulations may further comprise glycine at a concentration of less than 100 mM, less than 50 mM, less than 3.0 mM, less than 2.0 mM, or less than 1.8 mM. Preferably, the formulations comprise glycine at a concentration of 1.6 mM. The amount of glycine in the formulation should not cause a significant buffering in order to avoid antibody precipitation at its isoelectric point. The pH of the formulation may range from about 5.0 to about 7.0, preferably about 5.5 to about 6.5, more preferably about 5.8 to about 6.2, and most preferably about 6.0. To obtain an appropriate pH for a particular antibody, it is preferable that histidine (and glycine, if added) is first dissolved in water to obtain a buffer solution with higher pH than the desired pH and then the pH is brought down to the desired level by adding HCl. This way, the formation of inorganic salts (e.g., formation of NaCl when, for example, histidine hydrochloride is used as histidine and pH is raised to a desired level by adding NaOH) can be avoided.

[0369] The liquid formulations of the present invention can be prepared as unit dosage forms by preparing a vial containing an aliquot of the liquid formulation for a one-time use. For example, a unit dosage per vial may contain 0.1 ml, 0.25 ml, 0.5 ml, 1 ml, 2 ml, 3 ml, 4 ml, 5 ml, 6 ml, 7 ml, 8 ml, 9 ml, 10 ml, 15 ml, or 20 ml of different concentrations of an antibody of the invention ranging from about 15 mg/ml to about 300 mg/ml. If necessary, these preparations can be adjusted to a desired concentration by adding a sterile diluent to each vial.

[0370] The liquid formulations of the present invention may be sterilized by various sterilization methods, including sterile filtration, radiation, etc. In a most preferred embodiment, the difiltrated antibody formulation is filter-sterilized with a presterilized 0.2 or 0.22-micron filter. Sterilized liquid formulations of the present invention may be administered to a subject to prevent, treat, manage or ameliorate a RSV infection, one or more symptoms thereof, or a respiratory condition associated with, potentiated by, potentiating a RSV infection.

[0371] Preferably, the liquid formulations of the present invention are prepared by maintaining the antibodies in an aqueous solution at any time during the preparation. In other words, the liquid formulations are prepared without involving any step of drying the antibodies or the formulations themselves by, for example, lyophilization, vacuum drying, etc.

[0372] Although the invention is directed to liquid non-lyophilized formulations, it should be noted for the purpose of equivalents that the formulations of the invention may be lyophilized if desired. Thus, the invention encompasses lyophilized forms of the formulations of the invention although such lyophilized formulations are not necessary and, thus, not preferred.

### 5.3.3 Methods of Monitoring the Stability And Aggregation of Antibody Formulations

[0373] There are various methods available for assessing the stability of the liquid formulations of the present invention, based on the physical and chemical structures of the proteins (e.g., antibodies or fragments thereof) as well as on their biological activities. For example, to study denaturation of proteins, methods such as charge-transfer absorption, thermal analysis, fluorescence spectroscopy, circular dichroism, NMR, and HPSEC, are available. See, for example, Wang et al., 1988, J. of Parenteral Science & Technology 42(Suppl):S4-S26.

[0374] The rCGE and HPSEC are the most common and simplest methods to assess the formation of protein aggregates, protein degradation, and protein fragmentation. Accordingly, the stability of the liquid formulations of the present invention may be assessed by these methods. [003681 For example, the stability of the liquid formulations of the present invention may be evaluated by HPSEC or rCGE, wherein the percent area of the peaks represents the non-degraded antibody or non-degraded antibody fragments. In particular, approximately 250 μg of the antibody or antibody fragment that immunospecifically binds to a RSV antigen (approximately 25 μl of a liquid formulation comprising 10 mg/ml said antibody or antibody fragment) is injected onto a TosoH Biosep TSK G3000SW_{XL} column (7.8 mm×30 cm) fitted with a TSK SW ×1 guard column (6.0 mm CX 4.0 cm). The antibody or antibody fragment is eluted isocratically with 0.1 M disodium phosphate containing 0.1 M sodium sulfate and 0.05% sodium azide, at a flow rate of 0.8 to 1.0 ml/min. Eluted protein is detected using UV absorbance at 280 nm. palivizumab reference standard is run in the assay as a control, and the results are reported as the area percent of the product monomer peak compared to all other peaks excluding the included volume peak observed at approximately 12 to 14 minutes. Peaks eluting earlier than the monomer peak are recorded as percent aggregate.

[0375] The liquid formulations of the present invention exhibit low to undetectable levels of aggregation as measured by HPSEC or rCGE, that is, no more than 5%, no more than 4%, no more than 3%, no more than 2%, no more than 1%, and most preferably no more than 0.5% aggregate by weight protein, and low to undetectable levels of fragmentation, that is, 80% or higher, 85% or higher, 90% or higher, 95% or higher, 98% or higher, or 99% or higher, or 99.5% or higher of the total peak area in the peak(s) representing intact antibodies or fragments thereof. In the case of SDS-PAGE, the density or the radioactivity of each band stained or labeled with radioisotope can be measured and the % density or % radioactivity of the band representing non-degraded antibodies or fragments thereof can be obtained.

[0376] The stability of the liquid formulations of the present invention can be also assessed by any assays which measures the biological activity of the antibody or fragments thereof in the formulation. The biological activities of antibodies include, but are not limited to, antigen-binding activity, complement-activation activity, Fc-receptor binding activity, and so forth. Antigen-binding activity of the antibodies can be measured by any method known to those skilled in the art, including but not limited to ELISA, radioimmunoassay, Western blot, and the like. Complement-activation activity can be measured by a C3a/C4a assay in the system where the antibody which immunospecifically binds to a RSV antigen is reacted in the presence of the complement components with the cells expressing the RSV antigen. Also see Harlow et al., Antibodies: A Laboratory Manual, (Cold Spring Harbor Laboratory Press, 2nd ed. 1988) (incorporated by reference herein in its entirety). An ELISA based assay, e.g., may be used to compare the ability of an antibody or fragment thereof to immunospecifically bind to a RSV antigen to a palivizumab reference standard. In this assay, plates are coated with a RSV antigen and the binding signal of a set concentration of a palivizumab reference standard is compared to the binding signal of the same concentration of a test antibody or antibody fragment.

[0377] The purity of the liquid antibody formulations of the invention may be measured by any method well-known to one of skill in the art such as, e.g., HPSEC. The sterility of the liquid antibody formulations may be assessed as follows: sterile soybean-casein digest medium and fluid thioglycollate medium are inoculated with a test liquid antibody formulation by filtering the liquid antibody formulation through a sterile filter having a nominal porosity of 0.45 μm. When using the Sterisure™ or Steritest™ method, each filter device is aseptically filled with approximately 100 ml of sterile soybean-casein digest medium or fluid thioglycollate medium. When using the conventional method, the challenged filter is aseptically transferred to 100 ml of sterile soybean-casein digest medium or fluid thioglycollate medium. The media are incubated at appropriate temperatures and observed three times over a 14 day period for evidence of bacterial or fungal growth.

### 5.4 Gene Therapy

[0378] In a specific embodiment, nucleic acids comprising sequences encoding antibodies of the invention or functional derivatives thereof, are administered to prevent, manage, treat and/or ameliorate a RSV infection (e.g., acute RSV disease, or a RSV URI and/or LRI), otitis media (preferably, stemming from, caused by or associated with a RSV infection, such as a RSV URI and/or LRI), and/or a symptom or respiratory condition relating thereto (e.g., asthma, wheezing, and/or RAD) by way of gene therapy. Gene therapy refers to therapy performed by the administration to a subject of an expressed or expressible nucleic acid. In an embodiment of the invention, the nucleic acids produce their encoded antibody, and the antibody mediates a prophylactic or therapeutic effect.

[0379] Any of the methods for gene therapy available in the art can be used according to the present invention. Exemplary methods are described below.

[0380] For general reviews of the methods of gene therapy, see Goldspiel et al., 1993, Clinical Pharmacy 12:488-505; Wu and Wu, 1991, Biotherapy 3:87-95; Tolstoshev, 1993, Ann. Rev. Pharmacol. Toxicol. 32:573-596; Mulligan, 1993, Science 260:926-932; and Morgan and Anderson, 1993, Ann. Rev. Biochem. 62:191-217; May, 1993, TIBTECH 11(5): 155-215. Methods commonly known in the art of recombinant DNA technology which can be used are described in Ausubel et al. (eds.), Current Protocols in Molecular Biology, John Wiley & Sons, NY (1993); and Kriegler, Gene Transfer and Expression, A Laboratory Manual, Stockton Press, NY (1990).

[0381] In a preferred embodiment, a composition of the invention comprises nucleic acids encoding an antibody of the invention, said nucleic acids being part of an expression vector that expresses the antibody or chimeric proteins or heavy or light chains thereof in a suitable host. In particular, such nucleic acids have promoters, preferably heterologous promoters, operably linked to the antibody coding region, said promoter being inducible or constitutive, and, optionally, tissue-specific. In another particular embodiment, nucleic acid molecules are used in which the antibody coding sequences and any other desired sequences are flanked by regions that promote homologous recombination at a desired site in the genome, thus providing for intrachromosomal expression of the antibody encoding nucleic acids (Koller and Smithies, 1989, Proc. Natl. Acad. Sci. USA 86:8932-8935; Zijlstra et al., 1989, Nature 342:435-438). In some embodiments, the expressed antibody molecule is a single chain antibody; alternatively, the nucleic acid sequences include sequences encoding both the heavy and light chains, or fragments thereof, of the antibody.

[0382] Delivery of the nucleic acids into a subject may be either direct, in which case the subject is directly exposed to the nucleic acid or nucleic acid-carrying vectors, or indirect, in which case, cells are first transformed with the nucleic acids in vitro, then transplanted into the subject. These two approaches are known, respectively, as in vivo or ex vivo gene therapy.

[0383] In a specific embodiment, the nucleic acid sequences are directly administered in vivo, where the sequences are expressed to produce the encoded product. This can be accomplished by any of numerous methods known in the art, e.g., by constructing them as part of an appropriate nucleic acid expression vector and administering the vector so that the sequences become intracellular, e.g., by infection using defective or attenuated retrovirals or other viral vectors (see U.S. Pat. No. 4,980,286), or by direct injection of naked DNA, or by use of microparticle bombardment (e.g., a gene gun; Biolistic, Dupont), or coating with lipids or cell-surface receptors or transfecting agents, encapsulation in liposomes, microparticles, or microcapsules, or by administering them in linkage to a peptide which is known to enter the nucleus, by administering it in linkage to a ligand subject to receptor-mediated endocytosis (see, e.g., Wu and Wu, 1987, J. Biol. Chem. 262:4429-4432) (which can be used to target cell types specifically expressing the receptors), etc. In another embodiment, nucleic acid-ligand complexes can be formed in which the ligand comprises a fusogenic viral peptide to disrupt endosomes, allowing the nucleic acid to avoid lysosomal degradation. In yet another embodiment, the nucleic acid can be targeted in vivo for cell specific uptake and expression, by targeting a specific receptor (see, e.g., PCT Publications WO 92/06180; WO 92/22635; WO 92/20316; WO93/14188, WO 93/20221). Alternatively, the nucleic acid can be introduced intracellularly and incorporated within host cell DNA for expression, by homologous recombination (Koller and Smithies, 1989, Proc. Natl. Acad. Sci. USA 86:8932-8935; and Zijlstra et al., 1989, Nature 342:435-438).

[0384] In a specific embodiment, viral vectors that contains nucleic acid sequences encoding an antibody of the invention are used. For example, a retroviral vector can be used (see Miller et al., 1993, Meth. Enzymol. 217:581-599). These retroviral vectors contain the components necessary for the correct packaging of the viral genome and integration into the host cell DNA. The nucleic acid sequences encoding the antibody to be used in gene therapy can be cloned into one or more vectors, which facilitates delivery of the gene into a subject. More detail about retroviral vectors can be found in Boesen et al., 1994, Biotherapy 6:291-302, which describes the use of a retroviral vector to deliver the mdr 1 gene to hematopoietic stem cells in order to make the stem cells more resistant to chemotherapy. Other references illustrating the use of retroviral vectors in gene therapy are: Clowes et al., 1994, J. Clin. Invest. 93:644-651; Klein et al., 1994, Blood 83:1467-1473; Salmons and Gunzberg, 1993, Human Gene Therapy 4:129-141; and Grossman and Wilson, 1993, Curr. Opin. in Genetics and Devel. 3:110-114.

[0385] Adenoviruses are other viral vectors that can be used in gene therapy. Adenoviruses are especially attractive vehicles for delivering genes to respiratory epithelia. Adenoviruses naturally infect respiratory epithelia where they cause a mild disease. Other targets for adenovirus-based delivery systems are liver, the central nervous system, endothelial cells, and muscle. Adenoviruses have the advantage of being capable of infecting non-dividing cells. Kozarsky and Wilson, 1993, Current Opinion in Genetics and Development 3:499-503 present a review of adenovirus-based gene therapy. Bout et al., 1994, Human Gene Therapy 5:3-10 demonstrated the use of adenovirus vectors to transfer genes to the respiratory epithelia of rhesus monkeys. Other instances of the use of adenoviruses in gene therapy can be found in Rosenfeld et al., 1991, Science 252:431-434; Rosenfeld et al., 1992, Cell 68:143-155; Mastrangeli et al., 1993, J. Clin. Invest. 91:225-234; PCT Publication W094/12649; and Wang et al., 1995, Gene Therapy 2:775-783. In a preferred embodiment, adenovirus vectors are used.

[0386] Adeno-associated virus (AAV) has also been proposed for use in gene therapy (Walsh et al., 1993, Proc. Soc. Exp. Biol. Med. 204:289-300; and U.S. Pat. No. 5,436,146).

[0387] Another approach to gene therapy involves transferring a gene to cells in tissue culture by such methods as electroporation, lipofection, calcium phosphate mediated transfection, or viral infection. Usually, the method of transfer includes the transfer of a selectable marker to the cells. The cells are then placed under selection to isolate those cells that have taken up and are expressing the transferred gene. Those cells are then delivered to a subject.

[0388] In this embodiment, the nucleic acid is introduced into a cell prior to administration in vivo of the resulting recombinant cell. Such introduction can be carried out by any method known in the art, including but not limited to transfection, electroporation, microinjection, infection with a viral or bacteriophage vector containing the nucleic acid sequences, cell fusion, chromosome-mediated gene transfer, microcellmediated gene transfer, spheroplast fusion, etc. Numerous techniques are known in the art for the introduction of foreign genes into cells (see, e.g., Loeffler and Behr, 1993, Meth. Enzymol. 217:599-618; Cohen et al, 1993, Meth. Enzymol. 217:618-644; Clin. Pharma. Ther. 29:69-92 (1985)) and may be used in accordance with the present invention, provided that the necessary developmental and physiological functions of the recipient cells are not disrupted. The technique should provide for the stable transfer of the nucleic acid to the cell, so that the nucleic acid is expressible by the cell and preferably heritable and expressible by its cell progeny.

[0389] The resulting recombinant cells can be delivered to a subject by various methods known in the art. Recombinant blood cells (e.g., hematopoietic stem or progenitor cells) are preferably administered intravenously. The amount of cells envisioned for use depends on the desired effect, patient state, etc., and can be determined by one skilled in the art.

[0390] Cells into which a nucleic acid can be introduced for purposes of gene therapy encompass any desired, available cell type, and include but are not limited to epithelial cells, endothelial cells, keratinocytes, fibroblasts, muscle cells, hepatocytes; blood cells such as T lymphocytes, B lymphocytes, monocytes, macrophages, neutrophils, eosinophils, megakaryocytes, granulocytes; various stem or progenitor cells, in particular hematopoietic stem or progenitor cells, e.g., as obtained from bone marrow, umbilical cord blood, peripheral blood, fetal liver, etc.

[0391] In a preferred embodiment, the cell used for gene therapy is autologous to the subject.

[0392] In an embodiment in which recombinant cells are used in gene therapy, nucleic acid sequences encoding an antibody of the invention are introduced into the cells such that they are expressible by the cells or their progeny, and the recombinant cells are then administered in vivo for therapeutic effect. In a specific embodiment, stem or progenitor cells are used. Any stem and/or progenitor cells which can be isolated and maintained in vitro can potentially be used in accordance with this embodiment of the present invention (see e.g., PCT Publication WO 94/08598; Stemple and Anderson, 1992, Cell 7 1:973-985; Rheinwald, 1980, Meth. Cell Bio. 21A:229; and Pittelkow and Scott, 1986, Mayo Clinic Proc. 61:771).

[0393] In a specific embodiment, the nucleic acid to be introduced for purposes of gene therapy comprises an inducible promoter operably linked to the coding region, such that expression of the nucleic acid is controllable by controlling the presence or absence of the appropriate inducer of transcription.

### 5.5 Diagnostic Uses of Antibodies

[0394] Labeled antibodies of the invention (modified or unmodified) and derivatives and analogs thereof, which immunospecifically bind to a RSV antigen can be used for diagnostic purposes to detect, diagnose, or monitor a RSV URI and/or LRI or otitis media (preferably, stemming from, caused by or associated with a RSV infection, such as a RSV URI and/or LRI). The invention provides methods for the detection of a RSV infection (e.g., a RSV URI and/or LRI), otitis media (preferably stemming from, caused by or associated with a RSV infection, such as an upper and/or lower respiratory tract infection), or a symptom or respiratory condition relating thereto (including, but not limited to, asthma, wheezing, RAD, or a combination thereof) comprising: (a) assaying the expression of a RSV antigen in cells or a tissue sample of a subject using one or more antibodies of the invention that immunospecifically bind to the RSV antigen; and (b) comparing the level of the RSV antigen with a control level, e.g., levels in normal tissue samples not infected with RSV, whereby an increase in the assayed level of RSV antigen compared to the control level of the RSV antigen is indicative of a RSV infection (e.g., a RSV URI and/or LRI), otitis media-(preferably stemming from, caused by or associated with a RSV infection, such as an upper and/or lower respiratory tract infection), or a symptom or respiratory condition relating thereto (including, but not limited to, asthma, wheezing, RAD, or a combination thereof).

[0395] The invention provides a diagnostic assay for diagnosing a RSV infection (e.g., a RSV URI and/or LRI), otitis media (preferably stemming from, caused by or associated with a RSV infection, such as an upper and/or lower respiratory tract infection), or a symptom or respiratory condition relating thereto (including, but not limited to, asthma, wheezing, RAD, or a combination thereof) comprising: (a) assaying for the level of a RSV antigen in cells or a tissue sample of an individual using one or more antibodies of the invention that immunospecifically bind to a RSV antigen; and (b) comparing the level of the RSV antigen with a control level, e.g., levels in normal tissue samples not infected with RSV, whereby an increase in the assayed RSV antigen level compared to the control level of the RSV antigen is indicative of a RSV infection (e.g., a RSV URI and/or LRI), otitis media (preferably stemming from, caused by or associated with a RSV infection, such as an upper and/or lower respiratory tract infection), or a symptom or respiratory condition relating thereto (including, but not limited to, asthma, wheezing, RAD, or a combination thereof). A more definitive diagnosis of a RSV infection (e.g., a RSV URI and/or LRI), otitis media (preferably stemming from, caused by or associated with a RSV infection, such as an upper and/or lower respiratory tract infection), or a symptom or respiratory condition relating thereto (including, but not limited to, asthma, wheezing, RAD, or a combination thereof) may allow health professionals to employ preventative measures or aggressive treatment earlier thereby preventing the development or further progression of the RSV infection or otitis media.

[0396] Antibodies of the invention can be used to assay RSV antigen levels in a biological sample using classical immunohistological methods as described herein or as known to those of skill in the art (e.g., see Jalkanen et al., 1985, J. Cell. Biol. 101:976-985; and Jalkanen et al., 1987, J. Cell. Biol. 105:3087-3096). Other antibody-based methods useful for detecting protein gene expression include immunoassays, such as the enzyme linked immunosorbent assay (ELISA) and the radioimmunoassay (RIA). Suitable antibody assay labels are known in the art and include enzyme labels, such as, glucose oxidase; radioisotopes, such as iodine (¹²⁵I, ¹²¹I), carbon (¹⁴C), sulfur (³⁵S), tritium (³H), indium (¹²¹In), and technetium (⁹⁹Tc); luminescent labels, such as luminol; and fluorescent labels, such as fluorescein and rhodamine, and biotin.

[0397] One aspect of the invention is the detection and diagnosis of a RSV infection (e.g., a RSV URI and/or LRI), otitis media (preferably stemming from, caused by or associated with a RSV infection, such as an upper and/or lower respiratory tract infection), or a symptom or respiratory condition relating thereto (including, but not limited to, asthma, wheezing, RAD, or a combination thereof) in a human. In one embodiment, diagnosis comprises: a) administering (for example, parenterally, subcutaneously, or intraperitoneally) to a subject an effective amount of a labeled antibody that immunospecifically binds to a RSV antigen; b) waiting for a time interval following the administering for permitting the labeled antibody to preferentially concentrate at sites in the subject (e.g., the nasal passages, lungs, mouth and ears) where the RSV antigen is expressed (and for unbound labeled molecule to be cleared to background level); c) determining background level; and d) detecting the labeled antibody in the subject, such that detection of labeled antibody above the background level indicates that the subject has a RSV infection (e.g. a RSV URI and/or LRI), otitis media (preferably stemming from, caused by or associated with a RSV infection, such as an upper and/or lower respiratory tract infection), or a symptom or respiratory condition relating thereto (including, but not limited to, asthma, wheezing, RAD, or a combination thereof). Background level can be determined by various methods including, comparing the amount of labeled molecule detected to a standard value previously determined for a particular system.

[0398] It will be understood in the art that the size of the subject and the imaging system used will determine the quantity of imaging moiety needed to produce diagnostic images. In the case of a radioisotope moiety, for a human subject, the quantity of radioactivity injected will normally range from about 5 to 20 millicuries of ⁹⁹Tc. The labeled antibody will then preferentially accumulate at the location of cells which contain the specific protein. In vivo tumor imaging is described in S. W. Burchiel et al., “Immunopharmacokinetics of Radiolabeled Antibodies and Their Fragments.” (Chapter 13 in Tumor Imaging: The Radiochemical Detection of Cancer, S. W. Burchiel and B. A. Rhodes, eds., Masson Publishing Inc. (1982).

[0399] Depending on several variables, including the type of label used and the mode of administration, the time interval following the administration for permitting the labeled antibody to preferentially concentrate at sites in the subject and for unbound labeled antibody to be cleared to background level is 6 to 48 hours or 6 to 24 hours or 6 to 12 hours. In another embodiment the time interval following administration is 5 to 20 days or 5 to 10 days.

[0400] In one embodiment, monitoring of a RSV-URI and/or LRI is carried out by repeating the method for diagnosing the RSV URI and/or LRI, for example, one month after initial diagnosis, six months after initial diagnosis, one year after initial diagnosis, etc.

[0401] Presence of the labeled molecule can be detected in the subject using methods known in the art for in vivo scanning. These methods depend upon the type of label used. Skilled artisans will be able to determine the appropriate method for detecting a particular label. Methods and devices that may be used in the diagnostic methods of the invention include, but are not limited to, computed tomography (CT), whole body scan such as position emission tomography (PET), magnetic resonance imaging (MRI), and sonography.

[0402] In a specific embodiment, the molecule is labeled with a radioisotope and is detected in the patient using a radiation responsive surgical instrument (Thurston et al., U.S. Pat. No. 5,441,050). In another embodiment, the molecule is labeled with a fluorescent compound and is detected in the patient using a fluorescence responsive scanning instrument. In another embodiment, the molecule is labeled with a positron emitting metal and is detected in the patient using positron emission-tomography. In yet another embodiment, the molecule is labeled with a paramagnetic label and is detected in a patient using magnetic resonance imaging (MRI).

### 5.6 Biological Activity and Assays for Extended Half-Life of Modified Antibodies

[0403] Antibodies of the present invention may be characterized in a variety of ways. In particular, antibodies of the invention may be assayed for the ability to immunospecifically bind to a RSV antigen. Such an assay may be performed in solution (e.g., Houghten, 1992, Bio/Techniques 13:412-421), on beads (Lam, 1991, Nature 354:82-84), on chips (Fodor, 1993, Nature 364:555-556), on bacteria (U.S. Pat. No. 5,223,409), on spores (U.S. Pat. Nos. 5,571,698; 5,403,484; and 5,223,409), on plasmids (Cull et al., 1992, Proc. Natl. Acad. Sci. USA 89:1865-1869) or on phage (Scott and Smith, 1990, Science 249:386-390; Devlin, 1990, Science 249:404-406; Cwirla et al., 1990, Proc. Natl. Acad. Sci. USA 87:6378-6382; and Felici, 1991, J. Mol. Biol. 222:301-310) (each of these references is incorporated herein in its entirety by reference). Antibodies that have been identified to immunospecifically bind to a RSV antigen (e.g., a RSV F antigen) can then be assayed for their specificity and affinity for a RSV antigen.

[0404] The modified antibodies of the invention may be assayed for immunospecific binding to a RSV antigen and cross-reactivity with other antigens by any method known in the art. Immunoassays which can be used to analyze immunospecific binding and cross-reactivity include, but are not limited to, competitive and non-competitive assay systems using techniques such as western blots, radioimmunoassays, ELISA (enzyme linked immunosorbent assay), “sandwich” immunoassays, immunoprecipitation assays, precipitin reactions, gel diffusion precipitin reactions, immunodiffusion assays, agglutination assays, complement-fixation assays, immunoradiometric assays, fluorescent immunoassays, protein A immunoassays, to name but a few. Such assays are routine and well known in the art (see, e.g., Ausubel et al, eds, 1994, Current Protocols in Molecular Biology, Vol. 1, John Wiley & Sons, Inc., New York, which is incorporated by reference herein in its entirety). Exemplary immunoassays are described briefly below (but are not intended by way of limitation).

[0405] Immunoprecipitation protocols generally comprise lysing a population of cells in a lysis buffer such as RIPA buffer (1% NP-40 or Triton X-100, 1% sodium deoxycholate, 0.1% SDS, 0.15 M NaCl, 0.01 M sodium phosphate at pH 7.2, 1% Trasylol) supplemented with protein phosphatase and/or protease inhibitors (e.g., EDTA, PMSF, aprotinin, sodium vanadate), adding the antibody of interest to the cell lysate, incubating for a period of time (e.g., 1 to 4 hours) at 40° C., adding protein A and/or protein G sepharose beads to the cell lysate, incubating for about an hour or more at 40° C., washing the beads in lysis buffer and resuspending the beads in SDS/sample buffer. The ability of the antibody of interest to immunoprecipitate a particular antigen can be assessed by, e.g., western blot analysis. One of skill in the art would be knowledgeable as to the parameters that can be modified to increase the binding of the antibody to an antigen and decrease the background (e.g., pre-clearing the cell lysate with sepharose beads). For further discussion regarding immunoprecipitation protocols see, e.g., Ausubel et al, eds, 1994, Current Protocols in Molecular Biology, Vol. 1, John Wiley & Sons, Inc., New York at 10.16.1.

[0406] Western blot analysis generally comprises preparing protein samples, electrophoresis of the protein samples in a polyacrylamide gel (e.g., 8%- 20% SDS-PAGE depending on the molecular weight of the antigen), transferring the protein sample from the polyacrylamide gel to a membrane such as nitrocellulose, PVDF or nylon, incubating the membrane in blocking solution (e.g., PBS with 3% BSA or non-fat milk), washing the membrane in washing buffer (e.g., PBS-Tween 20), incubating the membrane with primary antibody (the antibody of interest) diluted in blocking buffer, washing the membrane in washing buffer, incubating the membrane with a secondary antibody (which recognizes the primary antibody, e.g., an anti-human antibody) conjugated to an enzymatic substrate (e.g., horseradish peroxidase or alkaline phosphatase) or radioactive molecule (e.g., ³²P or ¹²⁵I) diluted in blocking buffer, washing the membrane in wash buffer, and detecting the presence of the antigen. One of skill in the art would be knowledgeable as to the parameters that can be modified to increase the signal detected and to reduce the background noise. For further discussion regarding western blot protocols see, e.g., Ausubel et al, eds, 1994, Current Protocols in Molecular Biology, Vol. 1, John Wiley & Sons, Inc., New York at 10.8.1.

[0407] ELISAs comprise preparing antigen, coating the well of a 96 well microtiter plate with the antigen, adding the antibody of interest conjugated to a detectable compound such as an enzymatic substrate (e.g., horseradish peroxidase or alkaline phosphatase) to the well and incubating for a period of time, and detecting the presence of the antigen. In ELISAs the antibody of interest does not have to be conjugated to a detectable compound; instead, a second antibody (which recognizes the antibody of interest) conjugated to a detectable compound may be added to the well. Further, instead of coating the well with the antigen, the antibody may be coated to the well. In this case, a second antibody conjugated to a detectable compound may be added following the addition of the antigen of interest to the coated well. One of skill in the art would be knowledgeable as to the parameters that can be modified to increase the signal detected as well as other variations of ELISAs known in the art. For further discussion regarding ELISAs see, e.g., Ausubel et al, eds, 1994, Current Protocols in Molecular Biology, Vol. 1, John Wiley & Sons, Inc., New York at 11.2.1.

[0408] The binding affinity of an antibody to an antigen and the off-rate of an antibody-antigen interaction can be determined by competitive binding assays. One example of a competitive binding assay is a radioimmunoassay comprising the incubation of labeled antigen (e.g., ³H or ¹²⁵I) with the antibody of interest in the presence of increasing amounts of unlabeled antigen, and the detection of the antibody bound to the labeled antigen. The affinity of the antibody of the present invention for a RSV antigen and the binding off-rates can be determined from the data by scatchard plot analysis. Competition with a second antibody can also be determined using radioimmunoassays. In this case, a RSV antigen is incubated with an antibody of the present invention conjugated to a labeled compound (e.g., ³H or ¹²⁵I) in the presence of increasing amounts of an unlabeled second antibody.

[0409] In a preferred embodiment, BIAcore kinetic analysis is used to determine the binding on and off rates of antibodies to a RSV antigen. BIAcore kinetic analysis comprises analyzing the binding and dissociation of a RSV antigen from chips with immobilized antibodies on their surface.

[0410] The antibodies of the invention can also be assayed for their ability to inhibit the binding of RSV to its host cell receptor using techniques known to those of skill in the art. For example, cells expressing the receptor for RSV can be contacted with RSV in the presence or absence of an antibody and the ability of the antibody to inhibit RSV's binding can measured by, for example, flow cytometry or a scintillation assay. RSV (e.g., a RSV antigen such as F glycoprotein or G glycoprotein) or the antibody can be labeled with a detectable compound such as a radioactive label (e.g., 32P, 35S, and 125I) or a fluorescent label (e.g., fluorescein isothiocyanate, rhodamine, phycoerythrin, phycocyanin, allophycocyanin, o-phthaldehyde and fluorescamine) to enable detection of an interaction between RSV and its host cell receptor. Alternatively, the ability of antibodies to inhibit RSV from binding to its receptor can be determined in cell-free assays. For example, RSV or a RSV antigen such as G glycoprotein can be contacted with an antibody and the ability of the antibody to inhibit RSV or the RSV antigen from binding to its host cell receptor can be determined. Preferably, the antibody is immobilized on a solid support and RSV or a RSV antigen is labeled with a detectable compound. Alternatively, RSV or a RSV antigen is immobilized on a solid support and the antibody is labeled with a detectable compound. RSV or a RSV antigen may be partially or completely purified (e.g., partially or completely free of other polypeptides) or part of a cell lysate. Further, a RSV antigen may be a fusion protein comprising the RSV antigen and a domain such as glutathionine S transferase. Alternatively, a RSV antigen can be biotinylated using techniques well known to those of skill in the art (e.g., biotinylation kit, Pierce Chemicals; Rockford, Ill.).

[0411] The antibodies of the invention can also be assayed for their ability to inhibit or downregulate RSV replication using techniques known to those of skill in the art. For example, RSV replication can be assayed by a plaque assay such as described, e.g., by Johnson et al., 1997, Journal of Infectious Diseases 176:1215-1224. The modified antibodies of the invention can also be assayed for their ability to inhibit or downregulate the expression of RSV polypeptides. Techniques known to those of skill in the art, including, but not limited to, Western blot analysis, Northern blot analysis, and RT-PCR can be used to measure the expression of RSV polypeptides. Further, the antibodies of the invention can be assayed for their ability to prevent the formation of syncytia.

[0412] The antibodies of the invention are preferably tested in vitro, and then in vivo for the desired therapeutic or prophylactic activity, prior to use in humans. For example, in vitro assays which can be used to determine whether administration of a specific antibody or composition of the present invention is indicated, include in vitro cell culture assays in which a subject tissue sample is grown in culture, and exposed to or otherwise administered an antibody or composition of the present invention, and the effect of such an antibody or composition of the present invention upon the tissue sample is observed. In various specific embodiments, in vitro assays can be carried out with representative cells of cell types involved in a RSV infection (e.g., respiratory epithelial cells), to determine if an antibody or composition of the present invention has a desired effect upon such cell types. Preferably, the antibodies or compositions of the invention are also tested in in vitro assays and animal model systems prior to administration to humans. In a specific embodiment, cotton rats are administered an antibody the invention, or a composition of the invention, challenged with 10⁵ pfu of RSV, and four or more days later the rats are sacrificed and RSV titer and anti-RSV antibody serum titer is determined. Further, in accordance with this embodiment, the tissues (e.g., the lung tissues) from the sacrificed rats can be examined for histological changes.

[0413] In accordance with the invention, clinical trials with human subjects need not be performed in order to demonstrate the prophylactic and/or therapeutic efficacy of modified antibodies of the invention. In vitro and animal model studies using the antibodies can be extrapolated to humans and are sufficient for demonstrating the prophylactic and/or therapeutic utility of said antibodies.

[0414] Antibodies or compositions of the present invention for use in therapy can be tested for their toxicity in suitable animal model systems, including but not limited to rats, mice, cows, monkeys, and rabbits. For in vivo testing of an antibody or composition's toxicity any animal model system known in the art may be used.

[0415] Efficacy in preventing, managing, treating and/or ameliorating a RSV infection (e.g., acute RSV disease, or a RSV URI and/or LRI) may be demonstrated by determining the ability of an antibody or composition of the invention to inhibit the replication of the virus, to inhibit transmission or prevent the virus from establishing itself in its host, to reduce the incidence of a RSV URI and/or LRI, to prevent or reduce the progression of an upper respiratory tract RSV infection to a lower respiratory tract RSV infection, or to prevent, ameliorate or alleviate one or more symptoms associated with a RSV URI and/or LRI. Efficacy in treating, preventing or otherwise managing otitis media may be demonstrated by determining the ability of an antibody or composition of the invention to reduce the incidence or otitis media, to reduce the duration of otitis media, to prevent or reduce the progression of a RSV URI and/or LRI to otitis media, or to ameliorate one or more symptoms of otitis media. A therapy is considered therapeutic if there is, for example, a reduction is viral load, amelioration of one or more symptoms of a RSV URI and/or LRI or otitis media, or a respiratory condition relating thereto (including, but not limited to asthma, wheezing, RAD or a combination thereof), a reduction in the duration of a RSV URI and/or LRI or otitis media, a reduction in lower respiratory tract RSV infections, or a decrease in mortality and/or morbidity following administration of an antibody or composition of the invention. Further, the treatment is considered therapeutic if there is an increase in the immune response following the administration of one or more antibodies which immunospecifically bind to one or more RSV antigens.

[0416] Antibodies or compositions of the invention can be tested in vitro and in vivo for the ability to induce the expression of cytokines such as IFN-α, IFN-β, IFN-γ, IL-2, IL-3, IL-4, IL-5, IL-6, IL-7, IL-8, IL-9, IL-10, IL-12 and IL-15. Techniques known to those of skill in the art can be used to measure the level of expression of cytokines. For example, the level of expression of cytokines can be measured by analyzing the level of RNA of cytokines by, for example, RT-PCR and Northern blot analysis, and by analyzing the level of cytokines by, for example, immunoprecipitation followed by western blot analysis and ELISA. In a preferred embodiment, an antibody or composition of the invention is tested for its ability to induce the expression of IFN-γ.

[0417] Antibodies or compositions of the invention can be tested in vitro and in vivo for their ability to modulate the biological activity of immune cells, preferably human immune cells (e.g., T-cells, B-cells, and Natural Killer cells). The ability of an antibody or composition of the invention to modulate the biological activity of immune cells can be assessed by detecting the expression of antigens, detecting the proliferation of immune cells, detecting the activation of signaling molecules, detecting the effector function of immune cells, or detecting the differentiation of immune cells. Techniques known to those of skill in the art can be used for measuring these activities. For example, cellular proliferation can be assayed by ³H thymidine incorporation assays and trypan blue cell counts. Antigen expression can be assayed, for example, by immunoassays including, but are not limited to, competitive and non-competitive assay systems using techniques such as western blots, immunohistochemistry radioimmunoassays, ELISA (enzyme linked immunosorbent assay), “sandwich” immunoassays, immunoprecipitation assays, precipitin reactions, gel diffusion precipitin reactions, immunodiffusion assays, agglutination assays, complement-fixation assays, immunoradiometric assays, fluorescent immunoassays, protein A immunoassays and FACS analysis. The activation of signaling molecules can be assayed, for example, by kinase assays and electrophoretic shift assays (EMSAs).

[0418] Antibodies or compositions of the invention can also be tested for their ability to inhibit viral replication or reduce viral load in in vitro, ex vivo and in vivo assays. Antibodies or compositions of the invention can also be tested for their ability to decrease the time course of a RSV infection (e.g. a RSV URI and/or LRI), otitis media (preferably stemming from, caused by or associated with a RSV infection, such as an upper and/or lower respiratory tract infection), or a symptom or respiratory condition relating thereto (including, but not limited to, asthma, wheezing, RAD, or a combination thereof). Antibodies or compositions of the invention can also be tested for their ability to increase the survival period of humans suffering from a RSV infection (preferably, a RSV URI and/or LRI) by at least 25%, preferably at least 50%, at least 60%, at least 75%, at least 85%, at least 95%, or at least 99%. Further, antibodies or compositions of the invention can be tested for their ability reduce the hospitalization period of humans suffering from a RSV infection (preferably, a RSV URI and/or LRI) by at least 60%, preferably at least 75%, at least 85%, at least 95%, or at least 99%. Techniques known to those of skill in the art can be used to analyze the function of the antibodies or compositions of the invention in vivo.

[0419] The binding ability of IgGs and molecules comprising an IgG constant domain of FcRn fragment thereof to FcRn can be characterized by various in vitro assays. PCT publication WO 97/34631 by Ward discloses various methods in detail and is incorporated herein in its entirety by reference.

[0420] For example, in order to compare the ability of a modified antibody of the invention or fragments thereof to bind to FcRn with that of the unmodified or wild type IgG, the modified IgG or fragments thereof and the unmodified or wild type IgG can be radio-labeled and reacted with FcRn-expressing cells in vitro. The radioactivity of the cell-bound fractions can be then counted and compared. The cells expressing FcRn to be used for this assay are preferably endothelial cell lines including mouse pulmonary capillary endothelial cells (B10, D2.PCE) derived from lungs of B10.DBA/2 mice and SV40 transformed endothelial cells (SVEC) (Kim et al., J. Immunol., 40:457-465, 1994) derived from C3H/HeJ mice. However, other types of cells, such as intestinal brush borders isolated from 10- to 14-day old suckling mice, which express sufficient number of FcRn can be also used. Alternatively, mammalian cells which express recombinant FcRn of a species of choice can be also utilized. After counting the radioactivity of the bound fraction of modified IgG or that of the unmodified or wild type, the bound molecules can be then extracted with the detergent, and the percent release per unit number of cells can be calculated and compared.

[0421] Affinity of modified IgGs for FcRn can be measured by surface plasmon resonance (SPR) measurement using, for example, a BIAcore 2000 (BIAcore Inc.) as described previously (Popov et al., Mol. Immunol., 33:493-502, 1996; Karlsson et al., J. Immunol. Methods, 145:229-240, 1991, both of which are incorporated by reference in their entireties). In this method, FcRn molecules are coupled to a BIAcore sensor chip (e.g., CM5 chip by Pharmacia) and the binding of modified IgG to the immobilized FcRn is measured at a certain flow rate to obtain sensorgrams using BIA evaluation 2.1 software, based on which on- and off-rates of the modified IgG, constant domains, or fragments thereof, to FcRn can be calculated.

[0422] Relative affinities of modified IgGs or fragments thereof, and the unmodified or wild type IgG for FcRn can be also measured by a simple competition binding assay. Unlabeled modified IgG or unmodified or wild type IgG is added in different amounts to the wells of a 96-well plate in which FcRn is immobilize. A constant amount of radio-labeled unmodified or wild type IgG is then added to each well. Percent radioactivity of the bound fraction is plotted against the amount of unlabeled modified IgG or unmodified or wild type IgG and the relative affinity of the modified hinge-Fc can be calculated from the slope of the curve.

[0423] Furthermore, affinities of modified IgGs or fragments thereof, and the wild type IgG for FcRn can be also measured by a saturation study and the Scatchard analysis.

[0424] Transfer of modified IgG or fragments thereof across the cell by FcRn can be measured by in vitro transfer assay using radiolabeled IgG or fragments thereof and FcRn-expressing cells and comparing the radioactivity of the one side of the cell monolayer with that of the other side. Alternatively, such transfer can be measured in vivo by feeding 10- to 14-day old suckling mice with radiolabeled, modified IgG and periodically counting the radioactivity in blood samples which indicates the transfer of the IgG through the intestine to the circulation (or any other target tissue, e.g., the lungs). To test the dose-dependent inhibition of the IgG transfer through the gut, a mixture of radiolabeled and unlabeled IgG at certain ratio is given to the mice and the radioactivity of the plasma can be periodically measured (Kim et al., Eur. J. Immunol., 24:2429-2434, 1994).

[0425] The half-life of modified IgG or fragments thereof can be measured by pharmacokinetic studies according to the method described by Kim et al. (Eur. J. of Immuno. 24:542, 1994), which is incorporated by reference herein in its entirety. According to this method, radiolabeled modified IgG or fragments thereof is injected intravenously into mice and its plasma concentration is periodically measured as a function of time, for example, at 3 minutes to 72 hours after the injection. The clearance curve thus obtained should be biphasic, that is, α-phase and βphase. For the determination of the in vivo half-life of the modified IgGs or fragments thereof, the clearance rate in β-phase is calculated and compared with that of the unmodified or wild type IgG.

### 5.7 Methods of Producing Antibodies

[0426] Antibodies of the invention that immunospecifically bind to an antigen can be produced by any method known in the art for the synthesis of antibodies, in particular, by chemical synthesis or preferably, by recombinant expression techniques. The practice of the invention employs, unless otherwise indicated, conventional techniques in molecular biology, microbiology, genetic analysis, recombinant DNA, organic chemistry, biochemistry, PCR, oligonucleotide synthesis and modification, nucleic acid hybridization, and related fields within the skill of the art. These techniques are described in the references cited herein and are fully explained in the literature. See, e.g., Maniatis et al. (1982) Molecular Cloning: A Laboratory Manual, Cold Spring Harbor Laboratory Press; Sambrook et al. (1989), Molecular Cloning: A Laboratory Manual, Second Edition, Cold Spring Harbor Laboratory Press; Ausubel et al., Current Protocols in Molecular Biology, John Wiley & Sons (1987 and annual updates); Current Protocols in Immunology, John Wiley & Sons (1987 and annual updates) Gait (ed.) (1984) Oligonucleotide Synthesis: A Practical Approach, IRL Press; Eckstein (ed.) (1991) Oligonucleotides and Analogues: A Practical Approach, IRL Press; Birren et al. (eds.) (1999) Genome Analysis: A Laboratory Manual, Cold Spring Harbor Laboratory Press.

[0427] Polyclonal antibodies that immunospecifically bind to an antigen can be produced by various procedures well-known in the art. For example, a human antigen can be administered to various host animals including, but not limited to, rabbits, mice, rats, etc. to induce the production of sera containing polyclonal antibodies specific for the human antigen. Various adjuvants may be used to increase the immunological response, depending on the host species, and include but are not limited to, Freund's (complete and incomplete), mineral gels such as aluminum hydroxide, surface active substances such as lysolecithin, pluronic polyols, polyanions, peptides, oil emulsions, keyhole limpet hemocyanins, dinitrophenol, and potentially useful human adjuvants such as BCG (bacille Calmette-Guerin) and corynebacterium parvum. Such adjuvants are also well known in the art.

[0428] Monoclonal antibodies can be prepared using a wide variety of techniques known in the art including the use of hybridoma, recombinant, and phage display technologies, or a combination thereof. For example, monoclonal antibodies can be produced using hybridoma techniques including those known in the art and taught, for example, in Harlow et al., Antibodies: A Laboratory Manual, (Cold Spring Harbor Laboratory Press, 2nd ed. 1988); Hammerling, et al., in: Monoclonal Antibodies and T-Cell Hybridomas 563 681 (Elsevier, N.Y., 1981) (said references incorporated by reference in their entireties). The term “monoclonal antibody” as used herein is not limited to antibodies produced through hybridoma technology. The term “monoclonal antibody” refers to an antibody that is derived from a single clone, including any eukaryotic, prokaryotic, or phage clone, and not the method by which it is produced.

[0429] Methods for producing and screening for specific antibodies using hybridoma technology are routine and well known in the art. Briefly, mice can be immunized with a RSV antigen and once an immune response is detected, e.g., antibodies specific for a RSV antigen (preferably, RSV F antigen) are detected in the mouse serum, the mouse spleen is harvested and splenocytes isolated. The splenocytes are then fused by well known techniques to any suitable myeloma cells, for example cells from cell line SP20 available from the ATCC. Hybridomas are selected and cloned by limited dilution. Additionally, a RIMMS (repetitive immunization multiple sites) technique can be used to immunize an animal (Kilptrack et al., 1997 Hybridoma 16:381-9, incorporated by reference in its entirety). The hybridoma clones are then assayed by methods known in the art for cells that secrete antibodies capable of binding a polypeptide of the invention. Ascites fluid, which generally contains high levels of antibodies, can be generated by immunizing mice with positive hybridoma clones.

[0430] Accordingly, the present invention provides methods of generating antibodies by culturing a hybridoma cell secreting a modified antibody of the invention wherein, preferably, the hybridoma is generated by fusing splenocytes isolated from a mouse immunized with a RSV antigen with myeloma cells and then screening the hybridomas resulting from the fusion for hybridoma clones that secrete an antibody able to bind to a RSV antigen (preferably, RSV F antigen).

[0431] Antibody fragments which recognize specific RSV antigens (preferably, RSV F antigen) may be generated by any technique known to those of skill in the art. For example, Fab and F(ab′)₂ fragments of the invention may be produced by proteolytic cleavage of immunoglobulin molecules, using enzymes such as papain (to produce Fab fragments) or pepsin (to produce F(ab′)₂ fragments). F(ab′)₂ fragments contain the variable region, the light chain constant region and the CH1 domain of the heavy chain. Further, the antibodies of the present invention can also be generated using various phage display methods known in the art.

[0432] For example, antibodies can also be generated using various phage display methods. In phage display methods, functional antibody domains are displayed on the surface of phage particles which carry the polynucleotide sequences encoding them. In particular, DNA sequences encoding VH and VL domains are amplified from animal cDNA libraries (e.g., human or murine cDNA libraries of affected tissues). The DNA encoding the VH and VL domains are recombined together with an scFv linker by PCR and cloned into a phagemid vector. The vector is electroporated in E. coli and the E. coli is infected with helper phage. Phage used in these methods are typically filamentous phage including fd and M13 and the VH and VL domains are usually recombinantly fused to either the phage gene III or gene VIII. Phage expressing an antigen binding domain that binds to a particular antigen can be selected or identified with antigen, e.g., using labeled antigen or antigen bound or captured to a solid surface or bead. Examples of phage display methods that can be used to make the antibodies of the present invention include those disclosed in Brinkman et al., 1995, J. Immunol. Methods 182:41-50; Ames et al., 1995, J. Immunol. Methods 184:177-186; Kettleborough et al., 1994, Eur. J. Immunol. 24:952-958; Persic et al., 1997, Gene 187:9-18; Burton et al., 1994, Advances in Immunology 57:191-280; PCT application No. PCT/GB91/O1 134; International Publication Nos. WO 90/02809, WO 91/10737, WO 92/01047, WO 92/18619, WO 93/1 1236, WO 95/15982, WO 95/20401, and WO97/13844; and U.S. Pat. Nos. 5,698,426, 5,223,409, 5,403,484, 5,580,717, 5,427,908, 5,750,753, 5,821,047, 5,571,698, 5,427,908, 5,516,637, 5,780,225, 5,658,727, 5,733,743 and 5,969,108; each of which is incorporated herein by reference in its entirety.

[0433] As described in the above references, after phage selection, the antibody coding regions from the phage can be isolated and used to generate whole antibodies, including human antibodies, or any other desired antigen binding fragment, and expressed in any desired host, including mammalian cells, insect cells, plant cells, yeast, and bacteria, e.g., as described below. Techniques to recombinantly produce Fab, Fab′ and F(ab′)₂ fragments can also be employed using methods known in the art such as those disclosed in PCT publication No. WO 92/22324; Mullinax et al., 1992, BioTechniques 12(6):864-869; Sawai et al., 1995, AJRI 34:26-34; and Better et al., 1988, Science 240:1041-1043 (said references incorporated by reference in their entireties).

[0434] To generate whole antibodies, PCR primers including VH or VL nucleotide sequences, a restriction site, and a flanking sequence to protect the restriction site can be used to amplify the VH or VL sequences in scFv clones. Utilizing cloning techniques known to those of skill in the art, the PCR amplified VH domains can be cloned into vectors expressing a VH constant region, e.g., the human gamma 4 constant region, and the PCR amplified VL domains can be cloned into vectors expressing a VL constant region, e.g., human kappa or lambda constant regions. Preferably, the vectors for expressing the VH or VL domains comprise an EF-1α promoter, a secretion signal, a cloning site for the variable domain, constant domains, and a selection marker such as neomycin. The VH and VL domains may also cloned into one vector expressing the necessary constant regions. The heavy chain conversion vectors and light chain conversion vectors are then co-transfected into cell lines to generate stable or transient cell lines that express full-length antibodies, e.g., IgG, using techniques known to those of skill in the art.

[0435] For some uses, including in vivo use of antibodies in humans and in vitro detection assays, it may be preferable to use human or chimeric antibodies. Completely human antibodies are particularly desirable for therapeutic treatment of human subjects. Human antibodies can be made by a variety of methods known in the art including phage display methods described above using antibody libraries derived from human immunoglobulin sequences. See also U.S. Pat. Nos. 4,444,887 and 4,716,111; and International Publication Nos. WO 98/46645, WO 98/50433, WO 98/24893, WO98/16654, WO 96/34096, WO 96/33735, and WO 91/10741; each of which is incorporated herein by reference in its entirety.

[0436] Human antibodies can also be produced using transgenic mice which are incapable of expressing functional endogenous immunoglobulins, but which can express human immunoglobulin genes. For example, the human heavy and light chain immunoglobulin gene complexes may be introduced randomly or by homologous recombination into mouse embryonic stem cells. Alternatively, the human variable region, constant region, and diversity region may be introduced into mouse embryonic stem cells in addition to the human heavy and light chain genes. The mouse heavy and light chain immunoglobulin genes may be rendered non functional separately or simultaneously with the introduction of human immunoglobulin loci by homologous recombination. In particular, homozygous deletion of the J_{H} region prevents endogenous antibody production. The modified embryonic stem cells are expanded and microinjected into blastocysts to produce chimeric mice. The chimeric mice are then bred to produce homozygous offspring which express human antibodies. The transgenic mice are immunized in the normal fashion with a selected antigen, e.g., all or a portion of a polypeptide of the invention. Monoclonal antibodies directed against the antigen can be obtained from the immunized, transgenic mice using conventional hybridoma technology. The human immunoglobulin transgenes harbored by the transgenic mice rearrange during B cell differentiation, and subsequently undergo class switching and somatic mutation. Thus, using such a technique, it is possible to produce therapeutically useful IgG, IgA, IgM and IgE antibodies. For an overview of this technology for producing human antibodies, see Lonberg and Huszar (1995, Int. Rev. Immunol. 13:65-93). For a detailed discussion of this technology for producing human antibodies and human monoclonal antibodies and protocols for producing such antibodies, see, e.g., PCT publication Nos. WO 98/24893, WO 96/34096, and WO 96/33735; and U.S. Pat. Nos. 5,413,923, 5,625,126, 5,633,425, 5,569,825, 5,661,016, 5,545,806, 5,814,318, and 5,939,598, which are incorporated by reference herein in their entirety. In addition, companies such as Abgenix, Inc. (Freemont, Calif.) and Genpharm (San Jose, Calif.) can be engaged to provide human antibodies directed against a selected antigen using technology similar to that described above.

[0437] A chimeric antibody is a molecule in which different portions of the antibody are derived from different immunoglobulin molecules. Methods for producing chimeric antibodies are known in the art. See, e.g., Morrison, 1985, Science 229:1202; Oi et al., 1986, BioTechniques 4:214; Gillies et al., 1989, J. Immunol. Methods 125:191-202; and U.S. Pat. Nos. 5,807,715, 4,816,567, 4,816,397, and 6,331,415, which are incorporated herein by reference in their entirety.

[0438] A humanized antibody is an antibody or its variant or fragment thereof which is capable of binding to a predetermined antigen and which comprises a framework region having substantially the amino acid sequence of a human immunoglobulin and a CDR having substantially the amino acid sequence of a non-human immunoglobulin. A humanized antibody comprises substantially all of at least one, and typically two, variable domains (Fab, Fab′, F(ab′)₂, Fabc, Fv) in which all or substantially all of the CDR regions correspond to those of a non human immunoglobulin (i.e., donor antibody) and all or substantially all of the framework regions are those of a human immunoglobulin consensus sequence. Preferably, a humanized antibody also comprises at least a portion of an immunoglobulin constant region (Fc), typically that of a human immunoglobulin. Ordinarily, the antibody will contain both the light chain as well as at least the variable domain of a heavy chain. The antibody also may include the CH1, hinge, CH2, CH3, and CH4 regions of the heavy chain. The humanized antibody can be selected from any class of immunoglobulins, including IgM, IgG, IgD, IgA and IgE, and any isotype, including IgG1, IgG2, IgG3 and IgG4. Usually the constant domain is a complement fixing constant domain where it is desired that the humanized antibody exhibit cytotoxic activity, and the class is typically IgG1. Where such cytotoxic activity is not desirable, the constant domain may be of the IgG2 class. Examples of VL and VH constant domains that can be used in certain embodiments of the invention include, but are not limited to, C-kappa and C-gamma-1 (nG1m) described in Johnson et al. (1997) J. Infect. Dis. 176, 1215-1224 and those described in U.S. Pat. No. 5,824,307. The humanized antibody may comprise sequences from more than one class or isotype, and selecting particular constant domains to optimize desired effector functions is within the ordinary skill in the art. The framework and CDR regions of a humanized antibody need not correspond precisely to the parental sequences, e.g., the donor CDR or the consensus framework may be mutagenized by substitution, insertion or deletion of at least one residue so that the CDR or framework residue at that site does not correspond to either the consensus or the import antibody. Such mutations, however, will not be extensive. Usually, at least 75% of the humanized antibody residues will correspond to those of the parental FR and CDR sequences, more often 90%, and most preferably greater than 95%. Humanized antibodies can be produced using variety of techniques known in the art, including but not limited to, CDR-grafting (European Patent No. EP 239,400; International publication No. WO 91/09967; and U.S. Pat. Nos. 5,225,539, 5,530,101, and 5,585,089), veneering or resurfacing (European Patent Nos. EP 592,106 and EP 519,596; Padlan, 1991, Molecular Immunology 28(4/5):489-498; Studnicka et al., 1994, Protein Engineering 7(6):805-814; and Roguska et al., 1994, PNAS 91:969-973), chain shuffling (U.S. Pat. No. 5,565,332), and techniques disclosed in, e.g., U.S. Pat. No. 6,407,213, U.S. Pat. No. 5,766,886, WO 9317105, Tan et al., J. Immunol. 169:1119 25 (2002), Caldas et al., Protein Eng. 13(5):353-60 (2000), Morea et al., Methods 20(3):267 79 (2000), Baca et al, J. Biol. Chem. 272(16): 10678-84 (1997), Roguska et al., Protein Eng. 9(10):895 904 (1996), Couto et al., Cancer Res. 55 (23 Supp):5973s-5977s (1995), Couto et al., Cancer Res. 55(8):1717-22 (1995), Sandhu J S, Gene 150(2):409-10 (1994), and Pedersen et al., J. Mol. Biol. 235(3):959-73 (1994). See also U.S. patent Pub. No. US 2005/0042664 A1 (Feb. 24, 2005), which is incorporated by reference herein in its entirety. Often, framework residues in the framework regions will be substituted with the corresponding residue from the CDR donor antibody to alter, preferably improve, antigen binding. These framework substitutions are identified by methods well known in the art, e.g., by modeling of the interactions of the CDR and framework residues to identify framework residues important for antigen binding and sequence comparison to identify unusual framework residues at particular positions. (See, e.g., Queen et al., U.S. Pat. No. 5,585,089; and Reichmann et al., 1988, Nature 332:323, which are incorporated herein by reference in their entireties.)

[0439] Single domain antibodies, for example, antibodies lacking the light chains, can be produced by methods well-known in the art. See Riechmann et al., 1999, J. Immunol. 231:25-38; Nuttall et al., 2000, Curr. Pharm. Biotechnol. 1(3):253-263; Muylderman, 2001, J. Biotechnol. 74(4):277302; U.S. Pat. No. 6,005,079; and International Publication Nos. WO 94/04678, WO 94/25591, and WO 01/44301, each of which is incorporated herein by reference in its entirety.

[0440] Further, the antibodies that immunospecifically bind to a RSV antigen (e.g., a RSV F antigen) can, in turn, be utilized to generate anti-idiotype antibodies that “mimic” an antigen using techniques well known to those skilled in the art. (See, e.g., Greenspan & Bona, 1989, FASEB J. 7(5):437-444; and Nissinoff, 1991, J. Immunol. 147(8):2429-2438).

[0441] Generation of intrabodies is well-known to the skilled artisan and is described, for example, in U.S. Pat. Nos. 6,004,940; 6,072,036; 5,965,371, which are incorporated by reference in their entireties herein. Further, the construction of intrabodies is discussed in Ohage and Steipe, 1999, J. Mol. Biol. 291:1119-1128; Ohage et al., 1999, J. Mol. Biol. 291:1129-1134; and Wirtz and Steipe, 1999, Protein Science 8:2245-2250, which references are incorporated herein by reference in their entireties. Recombinant molecular biological techniques such as those described for recombinant production of antibodies may also be used in the generation of intrabodies.

[0442] In one embodiment, intrabodies of the invention retain about 75% of the binding effectiveness of the complete antibody (i.e., having the entire constant domain as well as the variable regions) to the antigen. More preferably, the intrabody retains at least 85% of the binding effectiveness of the complete antibody. Still more preferably, the intrabody retains at least 90% of the binding effectiveness of the complete antibody. Even more preferably, the intrabody retains at least 95% of the binding effectiveness of the complete antibody.

[0443] In producing intrabodies, polynucleotides encoding variable region for both the V_{H} and V_{L} chains of interest can be cloned by using, for example, hybridoma mRNA or splenic mRNA as a template for PCR amplification of such domains (Huse et al., 1989, Science 246:1276). In one preferred embodiment, the polynucleotides encoding the V_{H} and V_{L} domains are joined by a polynucleotide sequence encoding a linker to make a single chain antibody (scFv). The scFv typically comprises a single peptide with the sequence V_{H}-linker-V_{L} or V_{L}-linker-V_{H}. The linker is chosen to permit the heavy chain and light chain to bind together in their proper conformational orientation (see for example, Huston et al., 1991, Methods in Enzym. 203:46-121, which is incorporated herein by reference). In a further embodiment, the linker can span the distance between its points of fusion to each of the variable domains (e.g., 3.5 nm) to minimize distortion of the native Fv conformation. In such an embodiment, the linker is a polypeptide of at least 5 amino acid residues, at least 10 amino acid residues, at least 15 amino acid residues, or greater. In a further embodiment, the linker should not cause a steric interference with the V_{H} and V_{L} domains of the combining site. In such an embodiment, the linker is 35 amino acids or less, 30 amino acids or less, or 25 amino acids or less. Thus, in a most preferred embodiment, the linker is between 15-25 amino acid residues in length. In a further embodiment, the linker is hydrophilic and sufficiently flexible such that the V_{H} and V_{L} domains can adopt the conformation necessary to detect antigen. Intrabodies can be generated with different linker sequences inserted between identical V_{H} and V_{L} domains. A linker with the appropriate properties for a particular pair of V_{H} and V_{L} domains can be determined empirically by assessing the degree of antigen binding for each. Examples of linkers include, but are not limited to, those sequences disclosed in Table 5

TABLE 5

| Sequence | SEQ ID NO. |
|---|---|
| (Gly Gly Gly Gly Ser)₃ | SEQ ID NO: 260 |
| Glu Ser Gly Arg Ser Gly Gly Gly Gly Ser Gly | SEQ ID NO: 261 |
| Gly Gly Gly Ser | |
| Glu Gly Lys Ser Ser Gly Ser Gly Ser Glu | SEQ ID NO: 262 |
| Ser Lys Ser Thr | |
| Glu Gly Lys Ser Ser Gly Ser Gly Ser Glu Ser Lys | SEQ ID NO: 263 |
| Ser Thr Gln | |
| Glu Gly Lys Ser Ser Gly Ser Gly Ser Glu Ser | SEQ ID NO: 264 |
| Lys Val Asp | |
| Gly Ser Thr Ser Gly Ser Gly Lys Ser Ser Glu | SEQ ID NO: 265 |
| Gly Lys Gly | |
| Lys Glu Ser Gly Ser Val Ser Ser Glu Gln Leu Ala | SEQ ID NO: 266 |
| Gln Phe Arg Ser Leu Asp | |
| Glu Ser Gly Ser Val Ser Ser Glu Glu Leu Ala Phe Arg | SEQ ID NO: 267 |
| Ser Leu Asp | |

[0444] In one embodiment, intrabodies are expressed in the cytoplasm. In other embodiments, the intrabodies are localized to various intracellular locations. In such embodiments, specific localization sequences can be attached to the intrabody polypeptide to direct the intrabody to a specific location. Intrabodies can be localized, for example, to the following intracellular locations: endoplasmic reticulum (Munro et al., 1987, Cell 48:899-907; Hangejorden et al., 1991, J. Biol. Chem. 266:6015); nucleus (Lanford et al., 1986, Cell 46:575; Stanton et al.,1986, PNAS 83:1772; Harlow et al., 1985, Mol. Cell Biol. 5:1605; Pap et al., 2002, Exp. Cell Res. 265:288-93); nucleolar region (Seomi et al., 1990, J. Virology 64:1803; Kubota et al., 1989, Biochem. Biophys. Res. Comm. 162:963; Siomi et al., 1998, Cell 55:197); endosomal compartiment (Bakke et al., 1990, Cell 63:707-716); mitochondrial matrix (Pugsley, A. P., 1989, “Protein Targeting”, Academic Press, Inc.); Golgi apparatus (Tang et al., 1992, J. Bio. Chem. 267:10122-6); liposomes (Letourneur et al., 1992, Cell 69:1183); peroxisome (Pap et al., 2002, Exp. Cell Res. 265:288-93); trans Golgi network (Pap et al., 2002, Exp. Cell Res. 265:288-93); and plasma membrane (Marchildon et al., 1984, PNAS 81:7679-82; Henderson et al., 1987, PNAS 89:339-43; Rhee et al., 1987, J. Virol. 61:1045-53; Schultz et al., 1984, J. Virol. 133:431-7; Ootsuyama et al., 1985, Jpn. J. Can. Res. 76:1132-5; Ratner et al., 1985, Nature 313:277-84). Examples of localization signals include, but are not limited to, those sequences disclosed in Table 6.

TABLE 6

| Localization | Sequence | SEQ ID NO. |
|---|---|---|
| endoplasmic reticulum | Lys Asp Glu Leu | SEQ ID NO: 268 |
| endoplasmic reticulum | Asp Asp Glu Leu | SEQ ID NO: 269 |
| endoplasmic reticulum | Asp Glu Glu Leu | SEQ ID NO: 270 |
| endoplasmic reticulum | Gln Glu Asp Leu | SEQ ID NO: 271 |
| endoplasmic reticulum | Arg Asp Glu Leu | SEQ ID NO: 272 |
| Nucleus | Pro Lys Lys Lys Arg Lys Val | SEQ ID NO: 273 |
| Nucleus | Pro Gln Lys Lys Ile Lys Ser | SEQ ID NO: 274 |
| Nucleus | Gln Pro Lys Lys Pro | SEQ ID NO: 275 |
| Nucleus | Arg Lys Lys Arg | SEQ ID NO: 276 |
| Nucleus | Lys Lys Lys Arg Lys | SEQ ID NO: 277 |
| nucleolar region | Arg Lys Lys Arg Arg Gln Arg Arg Arg Ala | SEQ ID NO: 278 |
| | His Gln | |
| nucleolar region | Arg Gln Ala Arg Arg Asn Arg Arg Arg Arg | SEQ ID NO: 279 |
| | Trp Arg Glu Arg Gln Arg | |
| nucleolar region | Met Pro Leu Thr Arg Arg Arg Pro Ala Ala | SEQ ID NO: 280 |
| | Ser Gln Ala Leu Ala Pro Thr Pro | |
| endosomal compartment | Met Asp Asp Gln Arg Asp Leu Ile Ser Asn | SEQ ID NO: 281 |
| | Asn Glu Gln Leu Pro | |
| mitochondrial matrix | Met Leu Phe Asn Leu Arg Xaa Xaa Leu Asn | SEQ ID NO: 282 |
| | Asn Ala Ala Phe Arg His Gly His Asn Phe | |
| | Met Val Arg Asn Phe Arg Cys Gly Gln Pro | |
| | Leu Xaa | |
| Peroxisome | Ala Lys Leu | SEQ ID NO: 283 |
| trans Golgi network | Ser Asp Tyr Gln Arg Leu | SEQ ID NO: 284 |
| plasma membrane | Gly Cys Val Cys Ser Ser Asn Pro | SEQ ID NO: 285 |
| plasma membrane | Gly Gln Thr Val Thr Thr Pro Leu | SEQ ID NO: 286 |
| plasma membrane | Gly Gly Glu Leu Ser Gln His Glu | SEQ ID NO: 287 |
| plasma membrane | Gly Asn Ser Pro Ser Tyr Asn Pro | SEQ ID NO: 288 |
| plasma membrane | Gly Val Ser Gly Ser Lys Gly Gln | SEQ ID NO: 289 |
| plasma membrane | Gly Gln Thr Ile Thr Thr Pro Leu | SEQ ID NO: 290 |
| plasma membrane | Gly Gln Thr Leu Thr Thr Pro Leu | SEQ ID NO: 291 |
| plasma membrane | Gly Gln Ile Phe Ser Arg Ser Ala | SEQ ID NO: 292 |
| plasma membrane | Gly Gln Ile His Gly Leu Ser Pro | SEQ ID NO: 293 |
| plasma membrane | Gly Ala Arg Ala Ser Val Leu Ser | SEQ ID NO: 294 |
| plasma membrane | Gly Cys Thr Leu Ser Ala Glu Glu | SEQ ID NO: 295 |

[0445] VH and VL domains are made up of the immunoglobulin domains that generally have a conserved structural disulfide bond. In embodiments where the intrabodies are expressed in a reducing environment (e.g., the cytoplasm), such a structural feature cannot exist. Mutations can be made to the intrabody polypeptide sequence to compensate for the decreased stability of the immunoglobulin structure resulting from the absence of disulfide bond formation. In one embodiment, the VH and/or VL domains of the intrabodies contain one or more point mutations such that their expression is stabilized in reducing environments (see Steipe et al., 1994, J. Mol. Biol. 240:188-92; Wirtz and Steipe, 1999, Protein Science 8:2245-50; Ohage and Steipe, 1999, J. Mol. Biol. 291:1119-28; Ohage et al., 1999, J. Mol Biol. 291:1129-34).

### 5.7.1 Polynucleotides Encoding an Antibody

[0446] The invention provides polynucleotides comprising a nucleotide sequence encoding an antibody (modified or unmodified) of the invention that immunospecifically binds to a RSV antigen (e.g., RSV F antigen). The invention also encompasses polynucleotides that hybridize under high stringency, intermediate or lower stringency hybridization conditions, e.g., as defined supra, to polynucleotides that encode a modified antibody of the invention.

[0447] The polynucleotides may be obtained, and the nucleotide sequence of the polynucleotides determined, by any method known in the art. Since the amino acid sequences of AFFF, P12f2, P12f4, P11d4, Ale9, A12a6, A13c4, A17d4, A4B4, A8c7, 1X-493L1FR, H3-3F4, M3H9, Y10H6, DG, AFFF(1), 6H8, L1-7E5, L2-15B10, A13a11, A1h5, A4B4(1), A4B4L1FR-S28R (MEDI-524), A4B4-F52S, A17d4(1), A3e2, A14a4, A16b4, A17b5, A17f5, or A17h4 are known (see, e.g., Table 2), nucleotide sequences encoding these antibodies and modified versions of these antibodies can be determined using methods well known in the art, i.e., nucleotide codons known to encode particular amino acids are assembled in such a way to generate a nucleic acid that encodes the antibody. Such a polynucleotide encoding the antibody may be assembled from chemically synthesized oligonucleotides (e.g., as described in Kutmeier et al., 1994, BioTechniques 17:242), which, briefly, involves the synthesis of overlapping oligonucleotides containing portions of the sequence encoding the antibody, fragments, or variants thereof, annealing and ligating of those oligonucleotides, and then amplification of the ligated oligonucleotides by PCR.

[0448] Alternatively, a polynucleotide encoding an antibody of the invention may be generated from nucleic acid from a suitable source. If a clone containing a nucleic acid encoding a particular antibody is not available, but the sequence of the antibody molecule is known, a nucleic acid encoding the immunoglobulin may be chemically synthesized or obtained from a suitable source (e.g., an antibody cDNA library or a cDNA library generated from, or nucleic acid, preferably poly A+ RNA, isolated from, any tissue or cells expressing the antibody, such as hybridoma cells selected to express an antibody of the invention) by PCR amplification using synthetic primers hybridizable to the 3′ and 5′ ends of the sequence or by cloning using an oligonucleotide probe specific for the particular gene sequence to identify, e.g., a cDNA clone from a cDNA library that encodes the antibody. Amplified nucleic acids generated by PCR may then be cloned into replicable cloning vectors using any method well known in the art.

### 5.7.2 Mutagenesis

[0449] Once the nucleotide sequence of the antibody is determined (see, e.g., Section 5.7.4 below), the nucleotide sequence of the antibody may be manipulated using methods well known in the art for the manipulation of nucleotide sequences, e.g., recombinant DNA techniques, site directed mutagenesis, PCR, etc. (see, for example, the techniques described in Sambrook et al., 1990, Molecular Cloning, A Laboratory Manual, 2d Ed., Cold Spring Harbor Laboratory, Cold Spring Harbor, N.Y. and Ausubel et al., eds., 1998, Current Protocols in Molecular Biology, John Wiley & Sons, NY, which are both incorporated by reference herein in their entireties), to generate antibodies having a different amino acid sequence, for example to create amino acid substitutions, deletions, and/or insertions. In certain embodiments, amino acid substitutions, deletions and/or insertions are introduced into the epitope-binding domain regions of the antibodies and/or into the hinge-Fc regions of the antibodies which are involved in the interaction with the FcRn. In a preferred embodiment, antibodies having one or more modifications in the hinge-Fc domain at one or more of amino acid residues 251-256, 285-290, 308-314, 385-389, and 428-436 are generated.

[0450] In a specific embodiment, one or more of the CDRs is inserted within framework regions using routine recombinant DNA techniques. The framework regions may be naturally occurring or consensus framework regions, and preferably human framework regions (see, e.g., Chothia et al., 1998, J. Mol. Biol. 278:457-479 for a listing of human framework regions). Preferably, the polynucleotide sequence generated by the combination of the framework regions and CDRs encodes an antibody that immunospecifically binds to a particular antigen (e.g., an IL-9 polypeptide). Preferably, one or more amino acid substitutions may be made within the framework regions, and, preferably, the amino acid substitutions improve binding of the antibody to its antigen. Additionally, such methods may be used to make amino acid substitutions or deletions of one or more variable region cysteine residues participating in an intrachain disulfide bond to generate antibody molecules lacking one or more intrachain disulfide bonds. Other alterations to the polynucleotide are encompassed by the present invention and within the skill of the art.

[0451] Mutagenesis may be performed in accordance with any of the techniques known in the art including, but not limited to, synthesizing an oligonucleotide having one or more modifications within the sequence of the constant domain of an antibody or a fragment thereof (e.g., the CH2 or CH3 domain) to be modified. Site-specific mutagenesis allows the production of mutants through the use of specific oligonucleotide sequences which encode the DNA sequence of the desired mutation, as well as a sufficient number of adjacent nucleotides, to provide a primer sequence of sufficient size and sequence complexity to form a stable duplex on both sides of the deletion junction being traversed. Typically, a primer of about 17 to about 75 nucleotides or more in length is preferred, with about 10 to about 25 or more residues on both sides of the junction of the sequence being altered. A number of such primers introducing a variety of different mutations at one or more positions may be used to generated a library of mutants.

[0452] The technique of site-specific mutagenesis is well known in the art, as exemplified by various publications (see, e.g.,. Kunkel et al., Methods Enzymol., 154:367-82, 1987, which is hereby incorporated by reference in its entirety). In general, site-directed mutagenesis is performed by first obtaining a single-stranded vector or melting apart of two strands of a double stranded vector which includes within its sequence a DNA sequence which encodes the desired peptide. An oligonucleotide primer bearing the desired mutated sequence is prepared, generally synthetically. This primer is then annealed with the single-stranded vector, and subjected to DNA polymerizing enzymes such as T7 DNA polymerase, in order to complete the synthesis of the mutation-bearing strand. Thus, a heteroduplex is formed wherein one strand encodes the original non-mutated sequence and the second strand bears the desired mutation. This heteroduplex vector is then used to transform or transfect appropriate cells, such as E. coli cells, and clones are selected which include recombinant vectors bearing the mutated sequence arrangement. As will be appreciated, the technique typically employs a phage vector which exists in both a single stranded and double stranded form. Typical vectors useful in site-directed mutagenesis include vectors such as the M13 phage. These phage are readily commercially available and their use is generally well known to those skilled in the art. Double stranded plasmids are also routinely employed in site directed mutagenesis which eliminates the step of transferring the gene of interest from a plasmid to a phage.

[0453] Alternatively, the use of PCR™ with commercially available thermostable enzymes such as Taq DNA polymerase may be used to incorporate a mutagenic oligonucleotide primer into an amplified DNA fragment that can then be cloned into an appropriate cloning or expression vector. See, e.g., Tomic et al., Nucleic Acids Res., 18(6):1656, 1987, and Upender et al., Biotechniques, 18(1):29-30, 32, 1995, for PCR™-mediated mutagenesis procedures, which are hereby incorporated in their entireties. PCR™ employing a thermostable ligase in addition to a thermostable polymerase may also be used to incorporate a phosphorylated mutagenic oligonucleotide into an amplified DNA fragment that may then be cloned into an appropriate cloning or expression vector (see e.g., Michael, Biotechniques, 16(3):410-2, 1994, which is hereby incorporated by reference in its entirety).

[0454] Other methods known to those of skill in art of producing sequence variants of the Fc domain of an antibody or a fragment thereof can be used. For example, recombinant vectors encoding the amino acid sequence of the constant domain of an antibody or a fragment thereof may be treated with mutagenic agents, such as hydroxylamine, to obtain sequence variants.

### 5.7.3 Panning

[0455] Vectors, in particular, phage, expressing constant domains or fragments thereof having one or more modifications in amino acid residues 251-256, 285-290, 308-314, 385-389, and/or 428-436 can be screened to identify constant domains or fragments thereof having increased affinity for FcRn to select out the highest affinity binders from a population of phage. Immunoassays which can be used to analyze binding of the constant domain or fragment thereof having one or more modifications in amino acid residues 251 -256, 285-290, 308-314, 385-389, and/or 428-436 to the FcRn include, but are not limited to, radioimmunoassays, ELISA (enzyme linked immunosorbent assay), “sandwich” immunoassays, and fluorescent immunoassays. Such assays are routine and well known in the art (see, e.g., Ausubel et al., eds, 1994, Current Protocols in Molecular Biology, Vol. 1, John Wiley & Sons, Inc., New York, which is incorporated by reference herein in its entirety). Exemplary immunoassays are described briefly herein below (but are not intended by way of limitation). BIAcore kinetic analysis can also be used to determine the binding on and off rates of a constant domain or a fragment thereof having one or more modifications in amino acid residues 251-256, 285-290, 308-314, 385-389, and/or 428-436 to the FcRn. BIAcore kinetic analysis comprises analyzing the binding and dissociation of a constant domain or a fragment thereof having one or more modifications in amino acid residues 251-256, 285-290, 308-314, 385-389, and/or 428-436 from chips with immobilized FcRn on their surface (see Sections 5.1 and 6 herein).

### 5.7.4 Sequencing

[0456] Any of a variety of sequencing reactions known in the art can be used to directly sequence the nucleotide sequence encoding, e.g., variable regions and/or constant domains or fragments thereof having one or more modifications in amino acid residues 251 -256, 285-290, 308-314, 385-389, and/or 428-436. Examples of sequencing reactions include those based on techniques developed by Maxim and Gilbert (Proc. Natl. Acad. Sci. USA, 74:560, 1977) or Sanger (Proc. Natl. Acad. Sci. USA, 74:5463, 1977). It is also contemplated that any of a variety of automated sequencing procedures can be utilized (Bio/Techniques, 19:448, 1995), including sequencing by mass spectrometry (see, e.g., PCT Publication No. WO 94/16101, Cohen et al., Adv. Chromatogr., 36:127-162, 1996, and Griffin et al., Appl. Biochem. Biotechnol., 38:147-159, 1993).

### 5.7.5 Recombinant Expression of an Antibody

[0457] Recombinant expression of an antibody of the invention (e.g., a heavy or light chain of an antibody of the invention or a single chain antibody of the invention) that immunospecifically binds to a RSV antigen (e.g., RSV F antigen) requires construction of an expression vector containing a polynucleotide that encodes the antibody. Once a polynucleotide encoding an antibody molecule, heavy or light chain of an antibody, or fragment thereof (preferably, but not necessarily, containing the heavy and/or light chain variable domain) of the invention has been obtained, the vector for the production of the antibody molecule may be produced by recombinant DNA technology using techniques well-known in the art. Thus, methods for preparing a protein by expressing a polynucleotide containing an antibody encoding nucleotide sequence are described herein. Methods which are well known to those skilled in the art can be used to construct expression vectors containing antibody coding sequences and appropriate transcriptional and translational control signals. These methods include, for example, in vitro recombinant DNA techniques, synthetic techniques, and in vivo genetic recombination. The invention, thus, provides replicable vectors comprising a nucleotide sequence encoding an antibody molecule of the invention, a heavy or light chain of an antibody, a heavy or light chain variable domain of an antibody or a fragment thereof, or a heavy or light chain CDR, operably linked to a promoter. Such vectors may include the nucleotide sequence encoding the constant region of the antibody molecule (see, e.g., International Publication Nos. WO 86/05807 and WO 89/01036; and U.S. Pat. No. 5,122,464) and the variable domain of the antibody may be cloned into such a vector for expression of the entire heavy, the entire light chain, or both the entire heavy and light chains.

[0458] The expression vector is transferred to a host cell by conventional techniques and the transfected cells are then cultured by conventional techniques to produce an antibody of the invention. Thus, the invention includes host cells containing a polynucleotide encoding an antibody of the invention or fragments thereof, or a heavy or light chain thereof, or fragment thereof, or a single chain antibody of the invention, operably linked to a heterologous promoter. In preferred embodiments for the expression of double-chained antibodies, vectors encoding both the heavy and light chains may be co-expressed in the host cell for expression of the entire immunoglobulin molecule, as detailed below.

[0459] A variety of host-expression vector systems may be utilized to express the antibody molecules of the invention (see, e.g., U.S. Pat. No. 5,807,715). Such host-expression systems represent vehicles by which the coding sequences of interest may be produced and subsequently purified, but also represent cells which may, when transformed or transfected with the appropriate nucleotide coding sequences, express an antibody molecule of the invention in situ. These include but are not limited to microorganisms such as bacteria (e.g., E. coli and B. subtilis) transformed with recombinant bacteriophage DNA, plasmid DNA or cosmid DNA expression vectors containing antibody coding sequences; yeast (e.g., Saccharomyces Pichia) transformed with recombinant yeast expression vectors containing antibody coding sequences; insect cell systems infected with recombinant virus expression vectors (e.g., baculovirus) containing antibody coding sequences; plant cell systems infected with recombinant virus expression vectors (e.g., cauliflower mosaic virus, CaMV; tobacco mosaic virus, TMV) or transformed with recombinant plasmid expression vectors (e.g., Ti plasmid) containing antibody coding sequences; or mammalian cell systems (e.g., COS, CHO, BHK, 293, NS0, and 3T3 cells) harboring recombinant expression constructs containing promoters derived from the genome of mammalian cells (e.g., metallothionein promoter) or from mammalian viruses (e.g., the adenovirus late promoter; the vaccinia virus 7.5K promoter). Preferably, bacterial cells such as Escherichia coli, and more preferably, eukaryotic cells, especially for the expression of whole recombinant antibody molecule, are used for the expression of a recombinant antibody molecule. For example, mammalian cells such as Chinese hamster ovary cells (CHO), in conjunction with a vector such as the major intermediate early gene promoter element from human cytomegalovirus is an effective expression system for antibodies (Foecking et al., 1986, Gene 45:101; and Cockett et al., 1990, Bio/Technology 8:2). In a specific embodiment, the expression of nucleotide sequences encoding antibodies of the invention which immunospecifically bind to a RSV antigen (preferably, RSV F antigen) is regulated by a constitutive promoter, inducible promoter or tissue specific promoter.

[0460] In bacterial systems, a number of expression vectors may be advantageously selected depending upon the use intended for the antibody molecule being expressed. For example, when a large quantity of such an antibody is to be produced, for the generation of pharmaceutical compositions of an antibody molecule, vectors which direct the expression of high levels of fusion protein products that are readily purified may be desirable. Such vectors include, but are not limited to, the E. coli expression vector pUR278 (Ruther et al., 1983, EMBO 12:1791), in which the antibody coding sequence may be ligated individually into the vector in frame with the lac Z coding region so that a fusion protein is produced; pIN vectors (Inouye & Inouye, 1985, Nucleic Acids Res. 13:3101-3109; Van Heeke & Schuster, 1989, J. Biol. Chem. 24:5503-5509); and the like. pGEX vectors may also be used to express foreign polypeptides as fusion proteins with glutathione 5-transferase (GST). In general, such fusion proteins are soluble and can easily be purified from lysed cells by adsorption and binding to matrix glutathione agarose beads followed by elution in the presence of free glutathione. The pGEX vectors are designed to include thrombin or factor Xa protease cleavage sites so that the cloned target gene product can be released from the GST moiety.

[0461] In an insect system, Autographa californica nuclear polyhedrosis virus (AcNPV) is used as a vector to express foreign genes. The virus grows in Spodoptera frugiperda cells. The antibody coding sequence may be cloned individually into non-essential regions (for example the polyhedrin gene) of the virus and placed under control of an AcNPV promoter (for example the polyhedrin promoter).

[0462] In mammalian host cells, a number of viral-based expression systems may be utilized. In cases where an adenovirus is used as an expression vector, the antibody coding sequence of interest may be ligated to an adenovirus transcription/translation control complex, e.g., the late promoter and tripartite leader sequence. This chimeric gene may then be inserted in the adenovirus genome by in vitro or in vivo recombination. Insertion in a non-essential region of the viral genome (e.g., region E1 or E3) will result in a recombinant virus that is viable and capable of expressing the antibody molecule in infected hosts (e.g., see Logan & Shenk, 1984, Proc. Natl. Acad. Sci. USA 8 1:355-359). Specific initiation signals may also be required for efficient translation of inserted antibody coding sequences. These signals include the ATG initiation codon and adjacent sequences. Furthermore, the initiation codon must be in phase with the reading frame of the desired coding sequence to ensure translation of the entire insert. These exogenous translational control signals and initiation codons can be of a variety of origins, both natural and synthetic. The efficiency of expression may be enhanced by the inclusion of appropriate transcription enhancer elements, transcription terminators, etc. (see, e.g., Bittner et al., 1987, Methods in Enzymol. 153:51-544).

[0463] In addition, a host cell strain may be chosen which modulates the expression of the inserted sequences, or modifies and processes the gene product in the specific fashion desired. Such modifications (e.g., glycosylation) and processing (e.g., cleavage) of protein products may be important for the function of the protein. Different host cells have characteristic and specific mechanisms for the post-translational processing and modification of proteins and gene products. Appropriate cell lines or host systems can be chosen to ensure the correct modification and processing of the foreign protein expressed. To this end, eukaryotic host cells which possess the cellular machinery for proper processing of the primary transcript, glycosylation, and phosphorylation of the gene product may be used. Such mammalian host cells include but are not limited to CHO, VERY, BHK, Hela, COS, MDCK, 293, 3T3, W138, BT483, Hs578T, HTB2, BT2O and T47D, NS0 (a murine myeloma cell line that does not endogenously produce any immunoglobulin chains), CRL7O3O and HsS78Bst cells.

[0464] For long-term, high-yield production of recombinant proteins, stable expression is preferred. For example, cell lines which stably express the antibody molecule may be engineered. Rather than using expression vectors which contain viral origins of replication, host cells can be transformed with DNA controlled by appropriate expression control elements (e.g., promoter, enhancer, sequences, transcription terminators, polyadenylation sites, etc.), and a selectable marker. Following the introduction of the foreign DNA, engineered cells may be allowed to grow for 1-2 days in an enriched media, and then are switched to a selective media. The selectable marker in the recombinant plasmid confers resistance to the selection and allows cells to stably integrate the plasmid into their chromosomes and grow to form foci which in turn can be cloned and expanded into cell lines. This method may advantageously be used to engineer cell lines which express the antibody molecule. Such engineered cell lines may be particularly useful in screening and evaluation of compositions that interact directly or indirectly with the antibody molecule.

[0465] A number of selection systems may be used, including but not limited to, the herpes simplex virus thymidine kinase (Wigler et al., 1977, Cell 11:223), hypoxanthineguanine phosphoribosyltransferase (Szybalska & Szybalski, 1992, Proc. Natl. Acad. Sci. USA 48:202), and adenine phosphoribosyltransferase (Lowy et al., 1980, Cell 22:8-17) genes can be employed in tk-, hgprt- or aprt-cells, respectively. Also, antimetabolite resistance can be used as the basis of selection for the following genes: dhfr, which confers resistance to methotrexate (Wigler et al., 1980, Natl. Acad. Sci. USA 77:357; O'Hare et al., 1981, Proc. Natl. Acad. Sci. USA 78:1527); gpt, which confers resistance to mycophenolic acid (Mulligan & Berg, 1981, Proc. Natl. Acad. Sci. USA 78:2072); neo, which confers resistance to the aminoglycoside G-418 (Wu and Wu, 1991, Biotherapy 3:87-95; Tolstoshev, 1993, Ann. Rev. Pharmacol. Toxicol. 32:573-596; Mulligan, 1993, Science 260:926-932; and Morgan and Anderson, 1993, Ann. Rev. Biochem. 62:191-217; May, 1993, TIB TECH 11(5):155-2 15); and hygro, which confers resistance to hygromycin (Santerre et al., 1984, Gene 30:147). Methods commonly known in the art of recombinant DNA technology may be routinely applied to select the desired recombinant clone, and such methods are described, for example, in Ausubel et al. (eds.), Current Protocols in Molecular Biology, John Wiley & Sons, NY (1993); Kriegler, Gene Transfer and Expression, A Laboratory Manual, Stockton Press, NY (1990); and in Chapters 12 and 13, Dracopoli et al. (eds.), Current Protocols in Human Genetics, John Wiley & Sons, NY (1994); Colberre-Garapin et al., 1981, J. Mol. Biol. 150:1, which are incorporated by reference herein in their entireties.

[0466] The expression levels of an antibody molecule can be increased by vector amplification (for a review, see Bebbington and Hentschel, The use of vectors based on gene amplification for the expression of cloned genes in mammalian cells in DNA cloning, Vol. 3 (Academic Press, New York, 1987)). When a marker in the vector system expressing antibody is amplifiable, increase in the level of inhibitor present in culture of host cell will increase the number of copies of the marker gene. Since the amplified region is associated with the antibody gene, production of the antibody will also increase (Crouse et al., 1983, Mol. Cell. Biol. 3:257).

[0467] The host cell may be co-transfected with two expression vectors of the invention, the first vector encoding a heavy chain derived polypeptide and the second vector encoding a light chain derived polypeptide. The two vectors may contain identical selectable markers which enable equal expression of heavy and light chain polypeptides. Alternatively, a single vector may be used which encodes, and is capable of expressing, both heavy and light chain polypeptides. In such situations, the light chain should be placed before the heavy chain to avoid an excess of toxic free heavy chain (Proudfoot, 1986, Nature 322:52; and Kohler, 1980, Proc. Natl. Acad. Sci. USA 77:2197-2199). The coding sequences for the heavy and light chains may comprise cDNA or genomic DNA.

[0468] Once an antibody molecule of the invention has been produced by recombinant expression, it may be purified by any method known in the art for purification of an immunoglobulin molecule, for example, by chromatography (e.g., ion exchange, affinity, particularly by affinity for the specific antigen after Protein A, and sizing column chromatography), centrifugation, differential solubility, or by any other standard technique for the purification of proteins. Further, the antibodies of the present invention may be fused to heterologous polypeptide sequences described herein or otherwise known in the art to facilitate purification.

### 5.8 Kits

[0469] The invention also provides a pharmaceutical pack or kit comprising one or more containers filled with one or more of the ingredients of the pharmaceutical compositions of the invention, such as one or more modified or unmodified antibodies provided herein. Optionally associated with such container(s) can be a notice in the form prescribed by a governmental agency regulating the manufacture, use or sale of pharmaceuticals or biological products, which notice reflects approval by the agency of manufacture, use or sale for human administration.

[0470] The present invention provides kits that can be used in the above methods. In one embodiment, a kit comprises an antibody of the invention, preferably a purified antibody, in one or more containers. In a specific embodiment, the kits of the present invention contain a substantially isolated RSV antigen as a control. Preferably, the kits of the present invention further comprise a control antibody which does not react with the RSV antigen. In another specific embodiment, the kits of the present invention contain a means for detecting the binding of a modified antibody to a RSV antigen (e.g., the antibody may be conjugated to a detectable substrate such as a fluorescent compound, an enzymatic substrate, a radioactive compound or a luminescent compound, or a second antibody which recognizes the first antibody may be conjugated to a detectable substrate). In specific embodiments, the kit may include a recombinantly produced or chemically synthesized RSV antigen. The RSV antigen provided in the kit may also be attached to a solid support. In a more specific embodiment the detecting means of the above described kit includes a solid support to which RSV antigen is attached. Such a kit may also include a non-attached reporter-labeled anti-human antibody. In this embodiment, binding of the antibody to the RSV antigen can be detected by binding of the said reporter-labeled antibody.

### 6. EXAMPLES

### 6.1 Example

### Kinetic Analysis of Humanized RSV mAbs by BIACORE™

[0471] A typical kinetic study involved the injection of 250 μl of monoclonal antibody (“mAb”) at varying concentrations (25-300 nM) in PBS buffer containing 0.05% Tween-20 (PBS/Tween). The flow rate was maintained at 75 μl/min, giving a 15 minute dissociation time. Following the injection of mAb, the flow was exchanged with PBS/Tween buffer for 30 min for determining the rate of dissociation. The sensor chip was regenerated between cycles with a 1 min pulse of 100 mM HCl. The regeneration step caused a minimal loss of binding capacity of the immobilized F-protein (4% loss per cycle). This small decrease did not change the calculated values of the rate constants for binding and dissociation (also called the kₒₙ and k_{off}, respectively).

[0472] More specifically, for measurement of k_{assoc} (or kₒₙ), F protein was directly immobilized by the EDC/NHS method (EDC═N-ethyl-N′-[3-diethylaminopropyl)-carbodimide). Briefly, 25 μg/ml of F protein in 10 mM NaoAc, pH 5.0 was prepared and about a 5-10 μl injection gives about 30-50 RU (response units) of immobilized F protein under the above referenced conditions. The blank was subtracted for kinetic analysis. The column could be regenerated using 100 mM HCl (with 60 seconds of contact time being required for full regeneration). This treatment removed bound Fab completely without damaging the immobilized antigen and could be used for over 40 regenerations. For kₒₙ measurements, Fab concentrations were 0.39 nM, 0.75 nM, 1.56 nM, 3.13 nM, 12.5 nM, 25 nM, 50 nM, and 100 nM. The dissociation phase was analyzed for approximately 900 seconds. Kinetics were analyzed by 1:1 Langmuir fitting (global fitting). Measurements were done in HBS-EP buffer (10 mM HEPES, pH 7.4, 150 mM NaCl, 3 mM EDTA, 0.005% (v/v) Surfactant P20.

[0473] For measurements of combinatorial clones, as disclosed herein, the kₒₙ and k_{off} were measured separately. The kₒₙ was measured at conditions that were the same as those for the single mutation clones and was analyzed similarly.

[0474] For measuring k_{off}, the following conditions were employed. Briefly, 4100 RU of F protein were immobilized (as above) with CM-dextran used as the blank. Here, 3000 RU of Fab was bound (with dissociated Fab high enough to offset machine fluctuation). HBS plus 5 nM F protein (about 350-2000 times higher than the K_{d}—the dissociation equilibrium constant) was used as buffer. The dissociation phase was 6-15 hours at a flow rate of 5 μl/min. Under the conditions used herein, re-binding of the dissociated Fab was minimal. For further details, see the manual with the biosensor.

[0475] The binding of the high affinity anti-RSV antibodies to the F protein, or other epitopic sites on RSV, disclosed herein was calculated from the ratio of the first order rate constant for dissociation to the second order rate constant for binding or association (K_{d}=k_{off}/kₒₙ). The value for kₒₙ was calculated based on the following rate equation:
dR/dt=kₒₙ[mAb]Rₘₐₓ−(kₒₙ[mAb]+k_{off})R
where R and Rₘₐₓ are the response units at time t and infinity, respectively. A plot of dr/dt as a function of R gives a slope of (kₒₙ[mAb]+k_{off})—since these slopes are linearly related to the [mAb], the value kₒₙ can be derived from a replot of the slopes versus [mAb]. The slope of the new line is equal to kₒₙ. Although the value of k_{off} can be extrapolated from the Y— intercept, a more accurate value was determined by direct measurement of k_{off}. Following the injection phase of the mAb, PBS/Tween buffer flows across the sensor chip. From this point, [mAb]=0. The above stated equation for dR/dt thus reduces to:
dr/dt=k or dR/R=k_{off}dt

[0476] Integration of this equation then gives:
ln(R₀/Rₜ)=k_{off} t
where R₀/Rₜ) are the response units at time 0 (start of dissociation phase) and t, respectively. Lastly, plotting In(R₀/Rₜ) as a function of t gives a slope of k_{off}.

[0477] The numerical values from such antibody variants were as shown in Tables 7-10 below.

TABLE 7
Summary of Kinetic Constants for High Potency Antibodies

| | | | IC₅₀ |
|---|---|---|---|
| ANTIBODY | kₒₙ × 10⁵ (M⁻¹s⁻¹) | k_{off} × 10⁻⁴ (s⁻¹) | (nM) |
| **palivizumab | 2.04; 1.89; 2.18 | 7.64; 7.38; 7.02 | 3.57 |
| **AFFF(1) | 1.08; 0.96; 1.24 | 2.74; 2.66; 2.06 | |
| *1X-493L1FR | 1.85 | 6.5 | |
| *H3-3F4 | 4.59; 4.67; 5.72; 6.25; 5.33 | 4.45; 4.02 | |
| *M3H | 6.05 | 3.38 | |
| *Y10H6 | 7.57 | 4.62 | |
| *DG | 2.65; 2.83; 4.16; 3.18; 2.88 | 1.67; 4.44 | |
| *AFFF(1) | 2.12; 1.56; 1.86 | 2.45; 4.46; 2.68 | |
| *6H8 | 3.14; 4.44 | 1.78; 4.73 | |
| *L1-7E5 | 3.29; 3.57; 4.05; 3.35; 4.26 | 1.92; 3.31; 2.29 | |
| *L2-15B10 | 3.69; 2.82; 3.12; 5.33; 3.78 | 1.34; 4.16; 2.70 | |
| *P12f2 | 6.63 | 2.82 | 0.65 |
| *P12f4 | 5.27 | 2.99 | 0.70 |
| *P11d4 | 5.70; 5.72 | 7.17 | >20 |
| *A1e9 | 7.9 | 4.53 | 2.5 |
| *A12a6 | 7.43 | 2.30 | 0.62 |
| *A13a11 | 7.35 | 2.50 | 2.04 |
| *A13c4 | 7.81; 7.35 | 2.80 | 0.52 |

[0478] TABLE 8
Monoclonal Antibodies vs. Bac-F (1:1)

| | kon (×E+5) | koff (×E−5) | KD (nM) | Chi2 |
|---|---|---|---|---|
| P12f2 | 4.07 | 12.8 | 0.31 (13) | 0.9 |
| P12f4 | 4.95 | 5.55 | 0.11 (35) | 0.6 |
| A13c4 | 3.00 | 3.96 | 0.13 (30) | 1.2 |
| A12a6 | 4.60 | 1.65 | 0.04 (98) | 1.2 |
| A1e9 | 4.33 | 14.3 | 0.33 (12) | 2.5 |
| A8c7 | 4.17 | 8.75 | 0.21 (19) | 1.8 |
| P11d4 | 4.66 | 28.9 | 0.62 (6) | 1.0 |
| A17d4(1) | 4.56 | 4.07 | 0.09 (43) | 0.5 |
| A4B4 | 4.34 | 1.06 | 0.02 (195) | 1.5 |
| Palivizumab | 1.32 | 51.5 | 3.90 (1) | 0.6 |

[0479] TABLE 9
Monoclonal Antibodies vs. NUF4 (1:1)

| | kon (x E+5) | koff (x E−5) | KD (nM) | Chi2 |
|---|---|---|---|---|
| P12f2 | 5.41 | 17.8 | 0.33 (26) | 1.2 |
| P12f4 | 9.43 | 22.9 | 0.24 (36) | 0.9 |
| A13c4 | 3.65 | 27.2 | 0.75 (12) | 1.8 |
| A12a6 | 4.00 | 29.1 | 0.73 (12) | 1.9 |
| A1e9 | 8.43 | 58.4 | 0.69 (13) | 0.9 |
| A8c7 | 8.25 | 53.5 | 0.65 (13) | 0.7 |
| P11d4 | 9.04 | 76.6 | 0.85 (10) | 2.5 |
| A17d4(1) | 4.99 | 36.2 | 0.73 (12) | 2.0 |
| A4B4 | 4.96 | 28.2 | 0.57 (15) | 1.9 |
| Palivizumab | 3.04 | 265 | 8.70 (1) | 0.4 |

[0480] TABLE 10
Monoclonal Antibodies vs. NUF4 (2:1)

| | kon (x E+5) | koff (x E−5) | KD (nM) | Chi2 |
|---|---|---|---|---|
| P12f2 | 2.82 | 23.6 | 0.84 (371) | 1.5 |
| P12f4 | 2.73 | 63.6 | 2.33 (134) | 4.9 |
| A13c4 | 3.20 | 22.5 | 0.70 (446) | 1.7 |
| A12a6 | 2.18 | 40.8 | 1.87 (167) | 1.9 |
| A1e9 | 3.29 | 139 | 4.22 (74) | 2.8 |
| A8c7 | 4.30 | 114 | 2.65 (118) | 2.0 |
| P11d4 | 3.66 | 313 | 8.55 (36) | 3.6 |
| A17d4(1) | 2.64 | 29.2 | 1.11 (281) | 1.7 |
| A4B4 | 2.03 | 40.06 | 2.00 (156) | 1.4 |
| Palivizumab | 0.78 | 2420 | 312 (1) | 1.3 |

[0481] The bold and underlined amino acid residues of the indicated CDRs in Table 1 represent the amino acid residues located at the key locations within the CDRs of the high potency antibodies produced by the methods described herein and in copending applications Ser. Nos. 60/168,426 and 60/186,252. For example, to increase the potency of an antibody by producing a higher kₒₙ value, the amino acids located at the key positions as taught herein by the bold and underlined residues in Table 1 for the reference antibody would be replaced by the amino acids listed under CDRs in Table 2 and/or Table 3. Thus, these one letter codes represent the amino acids replacing the reference amino acids at the key positions (or critical positions) of the CDRs shown in FIG. 2 (residues in bold in the sequences of Table 2) for a reference antibody whose potency is to be increased.

### 6.2 Kinetic Analysis of Binding of A4B4L1FR-S28R (MEDI-524) by BIACORE™

[0482] The kinetics of the interactions of A4B4L1FR-S28R (MEDI-524) and palivizumab with RSV F-protein were determined by surface plasmon resonance (see, e.g., Jonsson et al., 1991, Biotechniques 11(5):620-627 and Johne, B. (1989). Epitope mapping by surface plasmon resonance in the BIAcore. Molecular Biotechnology 9(1):65-71) using a BIAcore 3000 instrument (BIAcore, Inc., Piscataway, N.J.). A recombinantly produced, C— terminally truncated RSV (A2 strain) F protein (Wathen et al., 1989, J Infect Dis 159(2):255-264) was used as the antigen for these studies. The truncated F protein, lacking the membrane anchor, was produced as a secreted product using a recombinant baculovirus expression system and was purified by successive chromatography steps on concanavalin-A and Q-sepharose columns. Purified F protein was covalently coupled to an N— hydroxysuccinimide-N-ethyl-N′-[3-diethylaminopropyl]-carbodiimide (EDC/NHS) activated CM5 sensor chip at a low protein density according to the manufacturer's protocol; unreacted active ester groups were blocked with 1 M ethanolamine. For reference purposes, a blank surface, containing no antigen, was prepared under identical immobilization conditions.

[0483] For kinetic measurements, a serial 2-fold dilution series of each mAb from 100 nm-0.2 nm, made in instrument buffer (HBS/Tween-20, BIAcore, Inc.), was injected over the F-protein and reference cell surfaces, which are connected in series. In each analysis, following the dissociation phase, the remaining bound antibody was removed from the sensor chip by passing a brief pulse of 100 mM HCl over the surface. Once an entire data set was collected, the resulting binding curves were globally fitted to a 1:1 Langmuir binding model using BIAevaluation software (BIAcore, Inc., Piscataway, N.J.). This algorithm calculates both the association rate (kₒₙ) and the dissociation rate (k_{off}), from which the apparent equilibrium binding constant, K_{d}, for each antibody was deduced as the ratio of the two rate constants, k_{off}/kₒₙ. A more detailed explanation of how the individual rate constants are derived can be found in the BIAevaluation Software Handbook (BIAcore, Inc., Piscataway, N.J.).

[0484] Kinetic analysis of binding by BIAcore evaluation (Table 11) revealed that, under the conditions of a low-density surface that were employed, A4B4L1FR-S28R (MEDI-524) had an approximately 70-fold greater affinity for RSV F protein than palivizumab. The increased affinity of MEDI-524 for the RSV F protein is attributed to a 4-fold increase in the association rate and an approximately 17-fold decrease in the dissociation rate. Since the rate at which MEDI-524 dissociates from the F protein surface approaches the detection limits of the BIAcore 3000 instrument, the dissociation rate generated for MEDI-524 is an estimation.

TABLE 11
Kinetic Analysis of Binding

| mAb | kₒₙ (M⁻¹ s⁻¹) | k_{off} (s⁻¹) | K_{d} (pM) |
|---|---|---|---|
| palivizumab | 1.14E+05 | 3.95E−04 | 3460 |
| MEDI-524 | 4.73E+05 | 2.35E−05 | 50 |

### 6.3 Example

### Microneutralization Assay

[0485] Neutralization of the antibodies of the present invention were determined by microneutralization assay. This microneutralization assay is a modification of the procedures described by Anderson et al. (1985, J. Clin. Microbiol. 22:1050-1052, the disclosure of which is hereby incorporated by reference in its entirety). The procedure used here is described in Johnson et al., 1999, J. Infectious Diseases 180:35-40, the disclosure of which is hereby incorporated by reference in its entirety. Antibody dilutions were made in triplicate using a 96-well plate. Ten TCID₅₀ of respiratory syncytial virus (RSV-Long strain) were incubated with serial dilutions of the antibody (or Fabs) to be tested for 2 hours at 37° C. in the wells of a 96-well plate. RSV susceptible HEp-2 cells (2.5×10⁴) were then added to each well and cultured for 5 days at 37° C. in 5% CO₂. After 5 days, the medium was aspirated and cells were washed and fixed to the plates with 80% methanol and 20% PBS. RSV replication was then determined by F protein expression. Fixed cells were incubated with a biotin-conjugated anti-F protein monoclonal antibody (pan F protein, C— site-specific mAb 133-1H) washed and horseradish peroxidase conjugated avidin was added to the wells. The wells were washed again and turnover of substrate TMB (3,3′,5,5′-tetramethylbenzidine) was measured at 450 nm. The neutralizing titer was expressed as the antibody concentration that caused at least 50% reduction in absorbency at 450 nm (the OD₄₅₀) from virus-only control cells. The results from the assay for the monoclonal antibodies and Fab fragments listed in Table 2 are shown in Table 11, supra, and Table 12,

TABLE 12
End Point RSV Microneutralization Titer Of High On Rate Mutant IgG and Fab

| | Mean | | Fold | Mean | | Fold | |
|---|---|---|---|---|---|---|---|
| | IC50 | STDEV | Difference | IC50 | STDEV | Difference | n |
| | (Curve) | Curve | (Curve | (Control) | Control | (Control | (assay |
| Molecule | μg/ml | IC50 | IC50) | μg/ml | IC50 | IC50) | repeat) |
| **palivizumab | 0.4527 | 0.208 | — | 0.5351 | 0.238 | — | 8 |
| **A1e9 | 0.0625 | 0.0268 | 7 | 0.0645 | 0.223 | 8 | 3 |
| **A17d4(1) | 0.0342 | 0.022 | 13 | 0.0354 | 0.0187 | 15 | 4 |
| **P11d4 | 0.0217 | 0.0331 | 21 | 0.0289 | 0.0110 | 19 | 5 |
| **P12f2 | 0.0231 | 0.0141 | 20 | 0.0223 | 0.0083 | 24 | 6 |
| **A8c7 | 0.0337 | 0.0309 | 13 | 0.0383 | 0.0283 | 14 | 5 |
| **A12a6 | 0.0357 | 0.0316 | 13 | 0.0354 | 0.0261 | 15 | 7 |
| **P12f4 | 0.0242 | 0.0163 | 19 | 0.0235 | 0.0076 | 23 | 7 |
| **A13c4 | 0.0376 | 0.0268 | 12 | 0.0375 | 0.0213 | 14 | 6 |
| **A4B4 | 0.0171 | 0.0018 | 27 | 0.0154 | 0.00417 | 35 | 2 |
| *A1e9 | 0.157 | — | 3 | 0.125 | — | 4 | 1 |
| *A17d4(1) | 0.0179 | — | 25 | 0.0171 | — | 31 | 1 |
| *P11d4 | >1.00 | — | — | >1.00 | — | — | 1 |
| *P12f2 | 0.0407 | 0.0112 | 11 | 0.0326 | 0.00905 | 16 | 2 |
| *A8c7 | 0.177 | — | 3 | 0.157 | — | 34 | 1 |
| *A12a6 | 0.0287 | 0.00417 | 16 | 0.0310 | 0.00982 | 17 | 2 |
| *P12f4 | 0.0464 | 0.00791 | 10 | 0.0351 | 0.0126 | 15 | 2 |
| *A13c4 | 0.0264 | 0.00141 | 17 | 0.0258 | 0.00071 | 21 | 2 |
| *A4B4 | 0.0414 | — | 11 | 0.0411 | — | 13 | 1 |
| *A13a11 | 0.120 | 0.0222 | 4 | 0.1022 | 0.0260 | 5 | 2 |
| *A1h5 | 0.194 | 0.462 | 2 | 0.176 | 0.0625 | 3 | 2 |

**Monoclonal Antibody
*Fab Fragment

### 6.4 RSV Microneutralization Assay

[0486] The ability of A4B4L1FR-S28R (MEDI-524) and palivizumab to inhibit the in vitro replication of RSV (Long strain) was evaluated using a RSV microneutralization assay. This assay is a modification of the procedure of Anderson et al. (Anderson et al., 1985, J Clin Microbiol 22: 1050-1052) as described by Johnson et al. (Johnson et al., 1997, J Infect Dis 176: 1215-1224). Antibody dilutions were made in duplicate to quadruplicate wells of a 96-well plate. Approximately 100-1000 TCID₅₀ of RSV (Long) were added to each dilution well and incubated for two hours at 37° C. Low passage, RSV susceptible HEp-2 cells (2.5×10⁴) were then added to each well and cultured for five days at 37° C. in a humidified 5% CO₂ incubator. After four or five days the cells were washed with PBS-0.1% Tween 20 and fixed to the plate with 80% acetone with 20% PBS. RSV replication was determined by quantitation of F protein expression using an F protein-specific ELISA. Fixed cells were incubated with the C-site specific, pa RSV F protein mAb 133-1H (Chemicon, Inc.), washed, and then incubated with horseradish peroxidase-conjugated goat anti-mouse IgG and washed again. The peroxidase substrate TMB (3,3′,5,5′-tetramethylbenzidine) was added to each well and the reaction was stopped after twenty minutes by the addition of 2 M H₂S0₄. Substrate turnover was measured at 450 nm (OD450) using a microplate reader. The neutralizing titer is expressed as the antibody concentration resulting in at least a 50% reduction in the OD450 value from control wells with virus only (IC₅₀). The results of this assay, shown in FIG. 3, indicate that MEDI-524 (average IC₅₀=18 ng/ml) is approximately 18-fold more potent than palivizumab (average IC₅₀=315 ng/ml).

### 6.5 RSV Microneutralization Assay with Cynomolgus BAL Samples

[0487] The ability of MEDI-524 present in the lungs of treated animals to inhibit the in vitro replication of RSV was evaluated using the RSV microneutralization assay. Four juvenile female cynomolgus monkeys (average weight 2.0 kg) were sedated with Telazol and dosed intravenously (i.v.) with MEDI-524 at 30 mg/kg body weight via the saphenous vein using an external infusion pump. Four days later, the animals were anesthetized with Telazol and a bronchial alveolar lavage (BAL) was performed on one lobe of the right lung with phosphate buffered saline (PBS). Titers of MEDI-524 in the BAL fluid were determined using a MEDI-524-specific ELISA. The BAL samples were tested undiluted and at serial 2-fold dilutions in the RSV microneutralization assay as above with purified MEDI-524 included as a control. The results of this assay, shown in FIG. 4, show that MEDI-524 retains full RSV neutralizing activity in the lungs of cynomolgus monkeys four days after infusion.

### 6.6 RSV Fusion Inhibition Assay

[0488] The ability of the antibodies of the invention to block RSV-induced fusion after viral attachment to the cells is determined in a fusion inhibition assay. This assay is identical to the microneutralization assay, except that the cells are infected with RSV (Long) for four hours prior to addition of antibody (Taylor et al., 1992, J. Gen. Virol. 73:2217-2223).

### 6.7 Isothermal Titration Calorimetry

[0489] Thermodynamic binding affinities and enthalpies were determined from isothermal titration calorimetry (ITC) measurements on the interaction of antibodies with RSV F glycoprotein (NUF4), an antigen which mimics the binding site of the RSV virus.

### Methods & Materials

Antibodies & Antigen

[0490] A13c4, A17d4(1), A4B4, and palivizumab were diluted in dialysate and the concentrations were determined by UV spectroscopic absorption measurements with a Perkin-Elmer Lambda 4B Spectrophotometer using an extinction coefficient of 217,000 M⁻¹cm⁻¹ at the peak maximum at 280 nm. The diluted NUF4 concentrations were calculated from the ratio of the mass of the original sample to that of the diluted sample since its extinction coefficient was too low to determine an accurate concentration without employing and losing a large amount of sample.

ITC Measurements

[0491] The binding thermodynamics of the antibodies were determined from ITC measurements using a Microcal, Inc. VP Titration Calorimeter. The VP titration calorimeter consists of a matched pair of sample and reference vessels (1.409 ml) enclosed in an adiabatic enclosure and a rotating stirrer-syringe for titrating ligand solutions into the sample vessel. The ITC measurements were performed at 25° C. and 35° C. The sample vessel contained the antibody in the phosphate buffer while the reference vessel contained just the buffer solution. The phosphate buffer solution was saline 67 mM PO₄ at pH 1.4 from HyClone, Inc. Five or ten μl aliquots of the 0.05 to 0.1 mM NUF4 solution were titrated 3 to 4 minutes apart into the antibody sample solution until the binding was saturated as evident by the lack of a heat exchange signal. With some antibody sample solutions, additional constant amounts of heat with the addition of each aliquot were observed following binding saturation of the antibody. This was attributed to a heat of dilution of the NUF4 titrant and was subtracted from the titrant heats obtained during the titration prior to analysis of the data.

[0492] A non-linear, least square minimization software program from Microcal, Inc., Origin 5.0, was used to fit the incremental heat of the ith titration (ΔQ (i)) of the total heat, Qₜ, to the total titrant concentration, Xₜ, according to the following equations (I),
Qₜ=nCₜΔHb°V{1+Xₜ/nCₜ+1/nK_{b}Cₜ−[(1+Xₜ/nCₜ+1/nK_{b}Cₜ)²−4Xₜ/nCₜ]^{1/2}}/2 (1a)
ΔQ(i)=Q(i)+dVi/2V {Q(i)+Q(i−1)}−Q(i−1) (1b)

[0493] where Cₜ is the initial antibody concentration in the sample vessel, V is the volume of the sample vessel, and n is the stoichiometry of the binding reaction, to yield values of K_{b}, ΔH_{b}°, and n. The optimum range of sample concentrations for the determination of K_{b} depends on the value of K_{b} and is defined by the following relationship.
CₜK_{b}n≦500 (2)

[0494] so that at 1 μM the maximum K_{b} that can be determined is less than 2.5×10⁸ M⁻¹. If the first titrant addition did not fit the binding isotherm, it was neglected in the final analysis since it may reflect release of an air bubble at the syringe opening-solution interface.

### Results

[0495] The ITC results are summarized in Table 13. The higher than 2 stoichiometries in Table 9 indicate that either the concentration determination of the antibody or NUF4 was incorrect. Since the same NUF4 sample was used as a titrant with antibodies having the amino acid sequence of A13c4 at 35° C and A17d4(1) at 35° C., which exhibit in at least one of the titrations the correct stoichiometry of 2, it is assumed that the titrant concentration was correct and that the large values of n result from incorrectly determined antibody concentrations. However, it can be shown that the binding constants are critically dependent on the titrant concentration and, thus, despite the 2-3 disparity in n, the binding constants are correct. Since the binding constants of antibodies having the amino acid sequence of A4B4 and A13c4 at 25° C. were near the upper determination limit by ITC (equation 2) and with the limited amount of available NUF4, it was decided to use 35° C. as the reference temperature for comprising the binding affinities. The results summarized in Table 13 show that the binding affinities to NUF4 are in the order A4B4>A13c4>A17d4(1)>palivizumab.

TABLE 13
Average Binding Constants and Enthalpies of NUF4 to Antibodies

| Antibody | K_{b} | ΔH_{b} in kJ mol⁻¹ |
|---|---|---|
| A4B4 | 269 ± 74 × 10⁶ M⁻¹ or ˜3.7 nM* | 92.8 ± 1.0 |
| A13c4 | 107 ± 28 × 10⁶ M⁻¹ or 9 nM | 67 ± 17 |
| A17d4(1) | 75 ± 14 × 10⁶ M⁻¹ or 13 nM | 68 ± 10 |
| palivizumab | 1.23 ± 0.17 × 10⁶ M⁻¹ or 810 nM | 71 ± 5 |

*Based only on the best titration run at 35° C.; 4.0 nM is ITC lower limit of 1/K_{b} range (ITC range is limited to [antibody]ₙ K_{b} = 500 where n is the stoichiometry and [antibody] is the concentration of the antibody in the cell).

### 6.8 Example

### Ultra-Potent Anti-RSV Antibodies

[0496] It is noted that the information in this Example further characterizes some of the antibodies presented in prior Examples, describes the production of some of those antibodies, and may include preliminary or additional results for certain assays for certain antibodies.

[0497] In this Example, increasing the affinity to RSV F protein by reducing antibody k_{off} translated very well into higher RSV neutralization ability for Fab fragments. Raising the affinity by increasing kₒₙ resulted in a great improvement in virus neutralization for both Fab and IgG forms. Additionally, bivalent binding to F protein, in either the IgG or F(ab′)₂ format, confers a substantial benefit in viral neutralization over monovalent binding by Fab.

### Materials and Methods

F Protein

[0498] The extracellular domain of the F protein from RSV A2 was expressed by a baculovirus expression system (Wathen et al. (1989) J. Infect. Dis. 159, 255-264) and was purified by an antibody-based affinity column chromatography using a C-site specific, anti-RSV F protein, murine monoclonal antibody, 1331H (Beeler et al. (1989) J. Virol. 63, 2941-2950).

Cloning of Palivizumab V Region into Phase Vector

[0499] The palivizumab (palivizumab) V region was cloned into a phage expression vector, M13IX104CS, containing human CH1 and kappa constant regions, according to the method described (Wu et al. (1999) J. Mol. Biol. 294, 151-162; Kunkel et al. (1985) Proc. Natl. Acad. Sci. USA, 82, 488-492). Appropriate reverse primers and biotinylated forward primers were used to amplify palivizumab V_{H} and kappa light chain variable region (V_{K}) from a plasmid. PCR products were purified by agarose gel electrophoresis, electroeluted, and phosphorylated by T4 polynucleotide kinase (Roche). The minus single-stranded DNA encoding V_{H} or V_{K} was isolated by dissociation of the double-stranded PCR product with sodium hydroxide while the plus biotinylated strand was captured by streptavidin-coated magnetic beads. The isolated V_{H} and V_{K} single-stranded DNA were annealed to the uridinylated M13IX104CS template, and T4 DNA polymerase (Roche), T4 DNA ligase (Roche), and concentrated synthesis buffer were added to the annealed product. The synthesized DNA was electroporated into DH10B cells and titered on an XL-1 Blue lawn. Several independent plaques were isolated, and phage DNA was prepared and sequenced to confirm cloning. The resulting phage DNA encoding palivizumab Fab was termed IX-493.

Modification of Framework 4 and Light Chain CDR1 Regions of Palivizumab

[0500] Several modifications were made to the palivizumab V region by site-directed mutagenesis (Kunkel et al. (1985) Proc. Natl. Acad. Sci. USA, 82, 488-492) prior to affinity maturation. Three oligonucleotides were synthesized, phosphorylated and annealed to the uridinylated IX-493 template to introduce mutations from K₂₄C₂₅Q₂₆L₂₇ to S₂₄A₂₅S₂₆S₂₇ in the LCDR1, L104 to V in the light chain FR4, and A105 to Q in the heavy chain FR4. For numbering used herein, please refer to Kabat et al. (1991) Sequences of proteins of immunological interest. (U.S. Department of Health and Human Services, Washington, D.C.) 5^{th} ed. The mutagenesis reaction was completed by adding DNA polymerase, DNA ligase, and synthesis buffer, and was electroporated into DH10B and titered on a lawn of XL-1 Blue. Many clones were screened by DNA sequencing, and the clone with all the desired mutations was termed 493L1FR. This clone was used as the template for the affinity maturation.

Construction of Focused CDR Libraries and Combinatorial Libraries

[0501] Six CDR libraries encoding single modifications at each CDR position were constructed in M13IX104CS vector simultaneously according to the method described (Wu et al. (1998) Proc. Natl. Acad. Sci. USA, 95, 6037-6042; Glaser at al. (1992) J. Immunol. 149, 3903-3913; Wu and An (2003) Tailoring kinetics of antibodies using focused combinatorial libraries. In Methods in Molecular Biology, vol. 207: Recombinant Antibodies for Cancer Therapy: Methods and Protocols (Welschof, M. & Krauss, J., eds), pp. 213-233, Humana Press, Totowa, N.J.). The CDR regions were defined as indicated in Kabat et al. (1991) Sequences of proteins of immunological interest. (U.S. Department of Health and Human Services, Washington, D.C.) 5^{th} ed. Prior to library construction, each individual CDR was deleted by site-directed mutagenesis (Kunkel et al. (1985) Proc. Natl. Acad. Sci. USA, 82, 488-492) to avoid the contamination of the library by the parental clone. Mutagenized oligonucleotides were designed to replace individual CDR regions with a TAA stop codon and an extra nucleotide, A, to cause a frameshift. The resulting clone was used as a template for the construction of its corresponding CDR library. Oligonucleotides encoding single mutations were synthesized by introducing NNK at each CDR position as described (Glaser et al. (1992) J. Immunol. 149, 3903-3913) and were used in the mutagenesis reaction for the library constructions. The constructed libraries were electroporated into DH10B and plated onto XL-1 Blue lawns for characterization and screening. The quality of the library was examined by plaque lift assay for Fab expression, and by DNA sequencing for the distribution of incorporated mutations. Appropriate distribution of mutations in each library was confirmed. Separate focused CDR libraries were constructed for the optimization of k_{off} and kₒₙ using 493L1FR and D95/G93 as a template respectively. D95/G93 clone was derived from mutagenesis of both HCDR3 and LCDR3 of one of the best k_{off}-optimized variants, AFFF(1). The mutation S95D on HCDR3 and F93G on LCDR3 moderately enhanced the kₒₙ of AFFF(1).

[0502] Combinatorial libraries were constructed to incorporate all beneficial mutations from each CDR. For optimization of k_{off}, degenerate oligonucleotides encoding both parental residue and beneficial mutations from HCDR1, HCDR3, LCDR2, and LCDR3 were synthesized and annealed to the uridinylated template of CDR-deleted 493L1FR, of which four related CDRs were deleted to prevent bias in the annealing. The annealed mixture was then processed as described (Wu et al. (1998) Proc. Natl. Acad. Sci. USA, 95, 6037-6042; Kunkel et al. (1985) Proc. Natl. Acad. Sci. USA, 82, 488-492). The quality of the combinatorial library was examined similarly as for focused CDR libraries. For optimization of k_{on,} a similar mutagenesis strategy was used to incorporate beneficial mutations from HCDR1, HCDR2, HCDR3, LCDR1, and LCDR2 into clone D95/G93.

Library Screening

[0503] Libraries containing palivizumab Fab variants were first screened by a capture lift approach (Watkins et al. (1998) Anal. Biochem. 256, 169-177). Nitrocellulose filters on which 10 μg/ml of mouse-adsorbed, goat anti-human kappa antibody (Southern Biotechnology Associates) was immobilized were applied to phage-infected bacterial lawns to capture expressed Fab variants. After overnight incubation in a 22° C. incubator, filters were removed and incubated in 4 ng/ml (˜0.07 nM) of F protein solution for 2 hours at room temperature. The filters were washed 4 times with 0.1% Tween 20/PBS buffer, then developed with an anti-F protein murine monoclonal antibody, 1331 H (Beeler et al. (1989) J. Virol. 63, 2941-2950), conjugated with alkaline phosphatase for 1 hour at room temperature. The filters were washed, and developed with alkaline phosphatase substrate for 10-15 minutes.

[0504] Positive clones identified by capture lift assay were further screened by ELISA (Watkins et al. (1997) Anal. Biochem. 253, 37-45). This assay allowed the rapid assessment of the relative affinities of the Fab variants. For k_{off}-optimization, IMMULON-1 microtiter plates were coated with 2 μg/ml goat anti-human Fab, and blocked with 0.5% BSA in PBS. 50 μl of Escherichia coli culture supernatant containing Fab was added to each microtiter well for 1 hour at 37 ° C. The plates were washed 3 times with PBS containing 0.1% Tween 20, then incubated with F protein at 40 ng/ml for 1 hour at 37 ° C. The plates were washed, incubated with alkaline phosphatase-conjugated antibody, 1331 H, for 1 hour at room temperature, washed again, and developed with alkaline phosphatase substrate.

[0505] For kₒₙ-optimization, a different ELISA screening approach using an antigen-enzyme precomplex was developed. In brief, IMMULON-1B plates were coated with 1 μg/ml goat anti-human kappa antibody, and blocked with 1% BSA in PBS. 200 μl of E. coli culture supernatant containing the Fab was added to each well for 2 hours at room temperature. The plates were washed three times with PBS containing 0.1% Tween 20. The antigen-enzyme precomplex was formed by mixing 0.5 nM biotinylated F protein with horseradish peroxidase-conjugated streptavidin, and biotinylated horseradish peroxidase at a 1:4:9 molar ratio for 30 minutes at 37° C. 50 μl of the antigen-enzyme precomplex was added to each well, and incubated for 10 minutes at room temperature. The plates were washed three times quickly in less than 30 seconds, and incubated with substrate for 15 minutes.

Binding Analysis by ELISA

[0506] Palivizumab Fab variants were expressed by infecting 15 ml XL-1 Blue with M13 phage carrying the Fab gene (Watkins et al. (1997) Anal. Biochem. 253, 37-45). Periplasmic extracts containing variant Fabs were prepared as described (Wu and An (2003), supra) diluted serially fourfold, and applied to IMMUNOLN-1 microtiter plates coated with 500 ng/ml F protein in a carbonate coating buffer. Subsequently, the plates were washed and the binding of antibody was detected with a goat anti-human kappa-alkaline phosphatase conjugate diluted 1000-fold in PBS containing 0.05% Tween 20. Several purified palivizumab variants in Fab or IgG format were also titrated on immobilized F protein and on RSV-infected cells. For binding to purified F protein, the procedure was similar to what was just described except that 100 ng/ml F protein was coated on the plates, and the bound antibody was detected with a goat anti-human kappa-horseradish peroxidase conjugate. To prepare RSV-infected cells, 1×10³ HEp-2 cells (human laryngeal epithelial carcinoma) per well (100 μl) were infected with RSV Long strain at a multiplicity of infection of 0.25 for 3 days. Cells were then carefully washed once with PBS containing 0.1% Tween 20, and subsequently fixed with a cold solution containing 80% acetone and 20% PBS at 4 ° C. for 15 minutes. The fixing solution was removed and the cells were dried at room temperature for 20 minutes. Purified antibodies diluted serially 5-fold were applied to the fixed cells, the plates were incubated at 37° C. for 1 hour, washed three times, and the bound antibodies were detected with a goat anti-human kappa-horseradish peroxidase conjugate.

[0507] To test the binding specificity of the k_{off}-improved variants to F protein, bacterial periplasmic extracts containing 100 ng/ml of variant Fabs were mixed with equal volumes of four-fold serially diluted palivizumab IgGs starting at 224 μg/ml. The mixtures were added to 96-well plates coated with 500 ng/ml F protein. After incubation of the plates for 16 hours at room temperature the unbound antibodies were removed by washing, and bound Fabs were detected with an alkaline phosphatase-conjugated monoclonal antibody, which recognizes a decapeptide tag on the carboxyl terminus of the Fab heavy chain. Palivizumab IgG instead of Fab was used in the assay because recombinant palivizumab Fab has the same detecting peptide tag as its Fab variants and is not appropriate for the assay. To test the binding specificity of the kₒₙ-improved variants to F protein, 200 ng/ml of purified Fab variants were mixed with equal volumes of four-fold serially diluted palivizumab IgGs starting at 448 μg/ml. Similar procedure as for k_{off}-improved variants was then followed except that the incubation time for binding to F protein was shortened to 4 hours at 37° C., and bound Fabs were detected with an anti-his tag antibody conjugated with horseradish peroxidase.

Fab Expression and Purification

[0508] Many Fab fragments were cloned into an over-expression vector under the control of the arabinose-regulated BAD promoter. In addition, a six-histidine tag was fused to the carboxyl terminus of the Fab heavy chain to facilitate purification. In general, a 1-liter bacterial culture was grown and the cells were harvested and resuspended in 10 ml buffer, pH 7.5, containing 20 mM NaH₂PO₄, 500 mM NaCl, and protease inhibitors of 0.1 mM AEBSF, 1 μM Pepstatin A, and 10 μM Leupeptin. The resuspended cells were sonicated, and then incubated with 1000 U DNase I (Sigma) for 30 minutes at 4° C. The Fab was purified from the cell extracts using nickel-chelating resins. The Fab was further purified by Mono S FPLC column. This usually resulted in >95% purity as determined by SDS-PAGE.

IgG Expression and Purification

[0509] The VH regions of the palivizumab Fab variants were amplified by PCR from phage and then fused with another PCR product containing heavy chain signal sequence by overlapping PCR. The combined PCR product was then linked to the palivizumab heavy constant region (γ1). To do this, the PCR products were digested with HindIII and SacI, and combined with a 3,544 bp SacI-BglII fragment and a 2,142 bp BglII-HindIII fragment, both from a palivizumab heavy chain expression vector (pMI226), in a three-part ligation. This resulted in an expression vector for each palivizumab heavy chain variant under the transcriptional control of the human cytomegalovirus major immediate early enhancer/promoter and the SV40 early polyadenylation region.

[0510] Using a similar strategy, the light chain genes of the palivizumab variants were synthesized by combining VL genes amplified from phage with the signal sequence and kappa constant regions amplified from the palivizumab light chain expression vector (pMI223) using overlapping PCR. The combined PCR products were then cloned into the same palivizumab light chain expression vector using a three-part ligation approach. The resulting vectors contain each light chain gene under the transcriptional control of the human cytomegalovirus major immediate early enhancer/promoter and the SV40 early polyadenylation region. In addition, the vector also contains a glutamine synthetase gene in the backbone to be used as a selectable marker by permitting growth in a glutamine-free medium.

[0511] Transient transfection of both heavy and light chain expression vectors into HEK293 or COS cells was usually performed for small-scale production of IgG. For production on a larger scale, a stable NS0 cell line was generated. For this, a single expression vector was constructed by cloning a 4.2 kb BglII-SalI fragment, containing the entire heavy chain expression cassette from the heavy chain expression vector, into the BamHI-SalI sites of the light chain expression vector, downstream of the light chain expression cassette. The vector was linearized by SalI digestion prior to transfection into NS0 cells by electroporation. Transfected cells were grown in a glutamine-free medium for selection.

[0512] Antibodies from both transient transfections or from stable cell lines were purified by chromatography on protein A columns.

Flow cytometry

[0513] The binding of the IgGs of palivizumab, A4b4 and AFFF(1) to F protein on the surface of RSV-infected cells was examined by flow cytometry. HEp-2 cells were infected at a multiplicity of infection of 1.5 with RSV Long. At 24 hours post-infection, the cells were detached, washed, and resuspended in FACS buffer (DPBS containing 1% BSA). The resuspended cells (2×10⁶ cells per sample) were incubated with the antibodies at 3 μg/ml for 15-20 minutes at room temperature. The cells were then collected and washed with FACS buffer. Cell-surface bound antibody was detected with goat anti-human IgG (H +L) conjugated to Alexa 647, and analyzed by FACS.

BIAcore Analysis

[0514] The kinetic interactions of palivizumab variants with RSV F protein were determined by surface plasmon resonance using a BIAcore 1000, 2000, or 3000 instrument (Biacore, Uppsala, Sweden). Purified recombinant, C-terminally truncated F protein was covalently coupled to a (1-ethyl-3-[3-dimethylaminopropyl]carbodiimide hydrochloride)/N— hydroxysuccinimide-activated CM5 sensor chip at a low protein density (Johnsson et al. (1991) Anal. Biochem. 198, 268-277). The unreacted active ester groups were blocked with 1 M ethanolamine. For use as a reference, when the BIAcore 2000 or 3000 instrument was used, a blank surface, containing no antigen, was prepared under identical immobilization conditions. To minimize binding variations caused by different lots of F proteins, most of the antibodies were measured against the same lot of F protein. In several cases when different lots of F proteins were used, their binding to palivizumab IgG was used as a reference to make sure that these lots had similar binding characteristics to the lot that we used mainly.

[0515] A serial 2-fold dilution series of purified antibodies, ranging from 0.2 to 100 nm in HBS/Tween 20 buffer (BIAcore), was injected over the F-protein and reference cell surfaces, which were connected in series. In each measurement, the residual antibody was removed from the sensor chip by a brief pulse of 100 mM HCl. The binding curves were globally fitted to a 1:1 Langmuir binding model using the BIAevaluation program. This algorithm calculates both kₒₙ and k_{off}. The apparent equilibrium dissociation constant, K_{d}, was deduced as the ratio of the two rate constants, k_{off}/kₒₙ.

RSV Microneutralization

[0516] A RSV microneutralization assay was used to analyze the ability of purified palivizumab variants to inhibit RSV (Long strain) replication in vitro as described (Johnson et al. (1997) J. Infect. Dis. 176, 1215-1224). Antibody dilutions were made in duplicate to quadruplicate in a 96-well plate.

[0517] Approximately 100-1000 TCID₅₀ of RSV were added to the wells and incubated for 2 hours at 37° C. Low passage, RSV-susceptible HEp-2 cells (2.5×10⁴ cells) were then added to each well and cultured for four to five days at 37° C. in a humidified 5% CO₂ incubator. After incubation, the cells were washed with 0.1% Tween 20/PBS and fixed to the plate with 80% acetone in 20% PBS. RSV replication was determined by quantitation of expressed F protein using an F protein-specific ELISA. Fixed cells were incubated with anti-RSV F protein murine antibody, 1331 H, then incubated with horseradish peroxidase-conjugated goat anti-mouse IgG. Substrate TMB (3,3′,5,5′-tetramethylbenzidine) was added to each well, and the plate was measured at 450 nm. The neutralizing titer (IC₅₀) is expressed as the antibody concentration resulting in a 50% reduction in the OD₄₅₀ value (background subtracted) of no neutralization. IC₅₀ values were deduced from 4-parameter curve fitting of the sigmoid dose-response curves using Sigma Plot program.

### Results

Further Humanization of Palivizumab and Restoration of its Light Chain CDR1

[0518] Prior to affinity maturation of palivizumab, a few modifications on the antibody were made. Amino acids KCQL, at positions 24 through 27 of the light chain CDR1 (LCDR1), were changed to the original murine monoclonal antibody 1129 sequence, SASS. The KCQL sequence represents four random, non-human, non-mouse residues that were introduced by a synthetic error during the previous humanization process (Johnson et al. (1997) J. Infect. Dis. 176, 1215-1224). In addition, we replaced the murine residues on the framework 4 (FR4) regions with human residues to reduce the possibility of immunogenicity. An amino acid substitution, A105Q, was made in the heavy chain FR4 to make a fully human JH6 germline sequence; an L104V substitution was made in the light chain FR4 to make a fully human JK4 germline sequence. The resulting clone, 493L1FR, contains fully human framework sequences (FIG. 6) and was expressed by a bacteriophage expression vector. Binding analysis of the 493L1FR Fab and palivizumab Fab by surface plasmon resonance using a BIAcore biosensor showed that both molecules bound RSV F protein with similar kinetics (Table 14). This result suggested that contrary to the earlier prediction based on structural modeling (Johnson et al. (1997) J. Infect. Dis. 176, 1215-1224) neither murine residue A105 on heavy chain FR4 nor L104 on light chain FR4 is involved significantly in F protein binding. Similarly, alteration of the first four LCDR1 residues to SASS does not substantially affect binding.

TABLE 14
Kinetics and viral neutralization of k_{off}-improved antibodies.

| | Sequence | | | | Fab | | | Fab | | IgG | |
|---|---|---|---|---|---|---|---|---|---|---|---|
| Clone | H1 | H3 | L2 | L3 | Kₒₙ (×10⁵) | K_{off} (×10⁴) | K_{d} | Microneutalization (IC₅₀) | | | |
| Kabat position | 32 | 100 | 52 | 93 | M⁻¹s⁻¹ | s⁻¹ | nM | μg/ml (nM)^{e} | | | |
| Palivizumab | S | W | S | G | 1.26 | 6.62 | 5.25 | 27.46 | (549.2) | 0.453 | (3.02) |
| Palivizumab^{a} | S | W | S | G | 1.19 | 7.22 | 6.07 | | | | |

| | | | | | | | | | | |
|---|---|---|---|---|---|---|---|---|---|---|
| 493L1FR | — | — | — | — | 1.85 | 6.51 | 3.52 | 26.30 | (526.0) | n.d. |
| Palivizumab^{a} | S | W | S | G | 1.19 | 7.22 | 6.07 | 26.30 | (526.0) | n.d. |

Single Mutations

| S32A | A | — | — | — | 1.96 | 0.93 | 0.47 | 4.85 | (97.0) | 0.465 | (3.10) |
|---|---|---|---|---|---|---|---|---|---|---|---|
| S32P^{b} | P | — | — | — | n.d. | n.d. | n.d. | n.d. | | n.d. | |
| W100F | — | F | — | — | 1.65 | 0.84 | 0.51 | 2.60 | (52.0) | 0.876 | (5.84) |

| | | | | | | | | | | |
|---|---|---|---|---|---|---|---|---|---|---|
| S52F | — | — | F | — | 2.06 | 1.75 | 0.85 | 7.27 | (1454) | n.d. |
| S52Y | — | — | Y | — | 1.70 | 1.25 | 0.74 | 5.99 | (119.8) | n.d. |
| G93F | — | — | — | F | 1.63 | 1.74 | 1.07 | 8.84 | (176.8) | n.d. |
| G93Y | — | — | — | Y | 1.62 | 1.53 | 0.94 | 6.26 | (125.2) | n.d. |
| G93W | — | — | — | W | 1.50 | 1.40 | 0.93 | 6.57 | (131.4) | n.d. |

Combinatorial Mutations

| AHH(1)^{c} | A | F | F | F | 1.34 | ≦0.05^{d} | ≦0.037 | 0.0715 | (1.43) | 0.306 | (2.04) |
|---|---|---|---|---|---|---|---|---|---|---|---|
| AFFY^{c} | A | F | F | Y | 1.22 | ≦0.05^{d} | ≦0.041 | 0.0754 | (1.51) | 0.407 | (2.71) |
| PFFF | P | F | F | F | 1.10 | ≦0.05^{d} | ≦0.045 | n.d. | | n.d. | |
| AFSF^{c} | A | F | — | F | 1.13 | ≦0.05^{d} | ≦0.044 | 0.0908 | (1.82) | 0.521 | (3.47) |
| AFFG^{c} | A | F | F | — | 1.33 | ≦0.05^{d} | ≦0.038 | 0.249 | (4.98) | 0.453 | (3.02) |

| PFFY^{b} | P | F | F | Y | n.d. | n.d. | n.d. | n.d. | n.d. |
|---|---|---|---|---|---|---|---|---|---|
| PFFW^{b} | P | F | F | W | n.d. | n.d. | n.d. | n.d. | n.d. |
| PFYF^{b} | P | F | Y | F | n.d. | n.d. | n.d. | n.d. | n.d. |
| n.d., not determined.; | | | | | | | | | |
| H1, HCDR1; | | | | | | | | | |
| H3, HCDR3; | | | | | | | | | |
| L2, LCDR2; | | | | | | | | | |
| L3, LCDR3. | | | | | | | | | |
| ^{a}This palivizumab Fab was prepared by papain cleavage of palivizumab IgG. Other palivizumab Fab used in this article was made by recombinant phage expression. | | | | | | | | | |
| ^{b}S32P was just a moderate beneficial mutation when compared with other single mutations by ELISA titration. It was therefore not further characterized by surface plasma resonance. Similarly for combinatorial variants, only the best five variants judged by ELISA titration were further characterized by surface plasma resonance, and PFFY, PFFW and PFYF were not among them. | | | | | | | | | |
| ^{c}The kinetics of these combinatorial variants in IgG format were also characterized by surface plasma resonance. Similarly to what were observed in their Fab formats, all of their k_{off} values are ≦5 × 10⁻⁶ because they have reached beyond the measurement limitation of BIAcore 3000 biosensor (5 × 10⁻⁶ s⁻¹), and could not be measured accurately. The kₒₙ values of these variants are: AFFF(1), 1.27 × 10⁵; | | | | | | | | | |
| # AFFY, 1.44 × 10⁵; AFSF, 1.47 × 10⁵; AFFG, 1.47 × 10⁵; | | | | | | | | | |

^{d}The k_{off} value of these combinatorial clones reached beyond the measurement limitation of BIAcore 3000 biosensor (5 × 10⁻⁶ s⁻¹), and could not be measured accurately;
^{e}For comparison purpose, the IC₅₀ values were converted to nM unit and are shown in parenthesis.

k_{off}-Driven Affinity Maturation

[0519] An established directed evolution approach (Wu et al. (1998) Proc. Natl. Acad. Sci. USA, 95, 6037-6042) was used to improve the affinity of 493L1FR for the RSV F protein. The 493L1FR Fab was subjected to focused mutations at each residue in each of the six CDR regions. Separate libraries for each CDR were generated using a modified codon-based mutagenesis approach that consists of a codon doping strategy that allows the segregation of diversity into pools based on the degree of mutagenesis (Glaser et al. (1992) J. Immunol. 149, 3903-3913; Wu and An (2003), supra). Each CDR library was constructed to contain all possible single mutations at each CDR residue. These focused libraries, containing 140 to 320 variants, allowed us to explore easily the potential affinity improvements in all possible amino acids at every CDR position.

[0520] M13 plaques expressing 493L1FR Fab variants were screened for increased affinity to F protein, first by a filter-based capture lift method (Watkins et al. (1998) Anal. Biochem. 256, 169-177), and second by a semi-quantitative ELISA assay (Watkins et al. (1997) Anal. Biochem. 253, 37-45). The improved affinity of the identified clones was confirmed by an ELISA titration on immobilized F protein. DNA sequencing of the affinity-enhanced clones revealed eight distinct beneficial mutations at four CDR positions: S32A and S32P at heavy chain CDR1 (HCDR1), W100F at heavy chain CDR3 (HCDR3), S52F and S52Y at light chain CDR2 (LCDR2), and G93F, G93Y and G93W at light chain CDR3 (LCDR3) (FIG. 7A). To help visualize the three-dimensional positions of the CDR residues important for k_{off} or kₒₙ and to assist with comparison of their relative locations, these beneficial positions were shown in a molecular model (Guex et al. (1997) Electrophoresis, 18, 2714-2723) based on the crystal structure of the palivizumab Fab (data not shown). Analysis by BIAcore biosensor of seven of these mutants showed a 3 to 7-fold improvement in affinity compared with the 493L1FR Fab (Table 14). The affinity improvement was mainly driven by a lower k_{off}. The best single mutation, S32A had a K_{d} at 0.47 nM; while palivizumab Fab had at K_{d} at 5.25 nM.

[0521] During this particular experiment, we did not identify any significant mutations in heavy chain CDR2 (HCDR2) or LCDR1 that were beneficial. However, we cannot rule out the possibility that HCDR2 and LCDR1 may still play roles in binding since we set our screening threshold sufficiently high so that only clones with a substantial increase in affinity would be identified and selected for further characterization. Indeed, identified two additional beneficial mutations, A25L and S27V, in LCDR1 (data not shown). The A25L mutation was later identified again in a kₒₙ-biased screening approach (Table 15).

TABLE 15
Summary of beneficial kₒₙ mutations.

| | CDRs | | | | | | | | | | | | | | | |
|---|---|---|---|---|---|---|---|---|---|---|---|---|---|---|---|---|
| | H1 | H2 | | | | H3 | | | L1 | | | L2 | | | | L3 |
| | Kabat No. | | | | | | | | | | | | | | | |
| | 32 | 55 | 57 | 58 | 65 | 95 | 98 | 100 | 24 | 25 | 29 | 52 | 53 | 54 | 55 | 93 |
| Palvizumab | S | D | K | D | S | S | T | W | K | C | S | S | K | L | A | G |
| 493L1FR | S | D | K | D | S | S | T | W | S | A | S | S | K | L | A | G |
| AFFF(1)^{a} | A | D | K | D | S | S | T | F | S | A | S | F | K | L | A | F |
| D95/G93 | A | D | K | D | S | D | T | F | S | A | S | F | K | L | A | G |

Single Mutations

| | | | | | | | | | | | | | | | |
|---|---|---|---|---|---|---|---|---|---|---|---|---|---|---|---|
| P | G | G | H | D | D | F | W | L | L | R | Y | G | H | S | G |
| | | | S | | | | | | P | F | R | R | Q | K | |
| | | | | | | | | | | | M | Y | | R | |
| | | | | | | | | | | | | F | | H | |
| | | | | | | | | | | | | | | P | |
| | | | | | | | | | | | | | | T | |
| | | | | | | | | | | | | | | D | |

Combinatorial Mutations^{b}

| | | | | | | | | | | | | | | | | |
|---|---|---|---|---|---|---|---|---|---|---|---|---|---|---|---|---|
| A1e9 | A | G | K | H | D | D | F | W | S | L | R | F | K | L | S | G |
| A1h5 | A | G | K | H | D | D | F | W | S | L | S | F | F | H | R | G |
| A3e2 | A | G | G | H | D | D | F | W | S | A | S | F | Y | L | H | G |
| A4b4 | A | D | K | H | D | D | F | F | S | A | R | F | F | L | D | G |
| A8c7 | A | D | K | S | D | D | F | W | S | P | R | R | Y | Q | S | G |
| A12a6 | A | G | K | D | D | D | F | F | S | A | R | F | K | L | S | G |
| A13a11 | A | D | K | H | D | D | F | W | S | P | R | Y | R | H | S | G |
| A13c4 | A | G | K | S | D | D | F | F | S | L | R | M | Y | Q | S | G |
| A14a4 | A | D | K | S | D | D | T | W | L | L | R | Y | Y | Q | T | G |
| A16b4 | A | D | K | H | D | D | F | W | L | L | R | M | Y | Q | A | G |
| A17b5 | A | D | K | H | D | D | F | W | S | L | R | Y | Y | L | P | G |
| A17d4(1) | A | G | K | S | D | D | F | F | L | P | R | M | Y | Q | S | G |
| A17f5 | A | D | K | D | D | D | F | W | S | L | R | F | R | H | T | G |
| A17h4 | A | G | K | H | D | D | F | W | S | P | S | Y | Y | L | A | G |
| P11d4 | P | G | K | H | D | D | F | W | S | P | R | M | R | L | A | G |
| P12f2 | P | D | K | H | D | D | F | F | S | L | R | F | Y | L | S | G |
| P12f4 | P | G | K | H | D | D | F | F | S | L | R | R | G | L | P | G |

^{a}Clone AFFF(1) is the best combinatorial variant from k_{off}-driven affinity maturation of palivizumab in terms of affinity and the ability to neutralize virus. It was used as a starting template for kₒₙ mutagenesis.
^{b}Substantially more combinatorial mutants were identified. This table lists only the top seventeen variants based on kₒₙ improvement.

[0522] A combinatorial library combining the eight beneficial mutations was constructed by site-directed mutagenesis using degenerate oligonucleotides. Plaque lifts that detected the expression of the kappa light chain and a decapeptide tag fused at the end of the heavy chain CH1 indicated that ˜27% of the combinatorial library clones express Fab. Sequencing of the DNA of 25 random functional clones showed that the distribution of the majority of the mutations was as expected, except that S52Y in LCDR2, S32A in HCDR1, and W100F in HCDR3 were potentially under-represented. A capture lift screening of ≧2,400 clones followed by screening by ELISA led to the identification of 48 variants that had higher affinity than clone S32A, the best single-mutation variant. Further characterization by antigen titration and DNA sequencing revealed 20 unique combinatorial variants. Titrations of antigen showed that combinatorial variants have significantly enhanced affinity over S32A (FIG. 8A). The variants each contain two to four beneficial mutations, and there is a loose correlation between the affinity and the number of beneficial mutations (data not shown). The best clones contain a W100F mutation in HCDR3; no other obvious pattern was observed. Since the best single mutation, S32A, was under-represented in the combinatorial library, we decided to incorporate this mutation with the combinatorial information derived from the four best clones, PFFF, AFSF, AFFG, and PFFY (Table 14). This led to the construction of clones AFFF(1) (FIG. 6) and AFFY by site-directed mutagenesis. Both clones had a very high affinity, comparable to the four best clones; this suggests that the combinatorial library was not screened thoroughly enough to pick up the under-represented clones, even though many redundant clones were identified during the screening. The eight best variants are listed in Table 14. BIAcore analysis of the five best variants showed their affinity was more than 117-fold higher than that of the palivizumab Fab, and the affinity increase arises from the k_{off} improvement (Table 14). Clone AFFF(1) Fab has a K_{d} at ≦0.037 nM; while palivizumab Fab has a K_{d} at 5.25 nM. It should be recognized that these combinatorial palivizumab Fab variants bind so tightly to the immobilized F protein on the sensor chip that an accurate dissociation rate could not be determined (the k_{off} detection limit for BIAcore 3000 is 5×10⁻⁶ s⁻¹).

[0523] To verify the binding specificity of these variants with improved k_{off}, clones S32A, AFFF(1), AFFY, PFFF, AFSF, AFFG, and PFFY in periplasmic extracts were tested in ELISA for binding to the F protein in competition with palivizumab IgG. All variants tested competed with palivizumab and their ability to compete correlated with their affinity. Typical inhibition curves are shown in FIG. 8B.

Functional Characterization of k_{off}-Improved Palivizumab Variants

[0524] We used microneutralization of RSV as the primary assay to screen the palivizumab variants for improvement of biological function (Johnson et al. (1997) J. Infect. Dis. 176, 1215-1224; Anderson (1985) J. Clin. Microbiol. 22, 1050-1052). This assay has been used successfully to screen donors for RSV IVIg and yielded very few false positives (Sibe et al. (1992) J. Infect. Dis. 165, 456-463). Analysis by microneutralization of the purified palivizumab combinatorial Fab variants with improved k_{off} showed a 110- to 384-fold greater potency than recombinant palivizumab Fab (Table 14 and FIG. 9A). Among both the single-mutation and combinatorial Fab variants, we observed an excellent correlation between their affinities and their ability to neutralize RSV in vitro (Table 14 and FIG. 10A).

[0525] Based on the affinity to F protein and the ability to neutralize virus, the two best single-mutation Fab variants, S32A and W100F, and the four best combinatorial Fab variants, AFFF(1), AFFY, AFSF, and AFFG, were converted to intact IgG1 antibodies and expressed in NS0 cells. These purified, full-length antibodies were tested in the microneutralization assay and to our surprise there was little to no increase in the in vitro potency when compared to intact palivizumab (Table 14 and FIG. 9B). It should be noted that the microneutralization data of the combinatorial variants in Table 14 are averages from at least two independent experiments; the data shown in FIGS. 9A and B are from one typical neutralization curve.

kₒₙ Optimization with Novel ELISA Screen

[0526] Many of the k_{off} combinatorial mutants had high potency for neutralization of RSV in the Fab format but did not show any further increase in potency upon conversion of Fab to IgG. We thus next explored the potential of optimizing kₒₙ. We reasoned that theoretically an antibody with a faster kₒₙ should have a better chance to bind to and neutralize the virus before the virus has the opportunity to infect the cells.

[0527] An iterative mutagenesis approach that involved screening of about ten CDR mutation libraries was used to gradually improve the kₒₙ. Clone AFFF(1) (FIG. 6) was used as a template in the first round of kₒₙ mutagenesis. This combinatorial Fab showed one of the best improvements in k_{off} and was the most potent viral neutralizing clone derived from the k_{off}-driven affinity maturation. Libraries consisting of single mutations in HCDR3 or LCDR3, double mutations in HCDR3 or LCDR3, and double mutations with one in HCDR3 and one in LCDR3 were prepared and screened. To identify variants with increased kₒₙ, we developed a novel ELISA screening method. In principle, we wanted to reduce the interaction time between antibody and antigen as much as possible to favor the selection of variants with higher kₒₙ. In addition, after the antibody-antigen complex was formed, both the number of washes and the washing time were minimized to reduce the impact of antibody-antigen complex dissociation. Using a BIAcore kinetic simulation program, we modeled several kinetic and interaction parameters, such as kₒₙ, k_{off}, and association and dissociation times (Wu and An (2003), supra). Appropriate association and dissociation ELISA conditions were then determined, thus allowing the easy selection of high kₒₙ variants over low k_{off} variants in output signals. We screened using a 10-minute incubation time for antibody-antigen interaction followed by three quick washes in less than 30 seconds. We also eliminated the conventional second step of applying a secondary detection antibody. Instead, we precomplexed the biotinylated F protein with horseradish peroxidase-conjugated streptavidin and used it in the first step. To boost the ELISA signal, we also added biotinylated HRP to the precomplex.

[0528] Four heavy chain variants, S95D, S95F, S95L and S95N/M96S, were identified from the HCDR3 libraries, and three light chain variants, F93A, F93G, and F93W, were identified from a LCDR3 library. As estimated by BIAcore analysis, most of these mutations improved the association rate only marginally, by less than 80%. Interestingly, F93G mutation represents a reversion to a wild-type residue. It was mutated to an F in the clone AFFF(1) which was selected for its improved k_{off}. The mutation at light chain position 93 to W was also identified earlier, in the context of 493L1FR, for its improved k_{off}, with no kₒₙ benefit. A combinatorial library consisting of these beneficial kₒₙ mutations was subsequently constructed and screened. Two of the best combinatorial clones were the combinations of S95D with F93G or F93W.

[0529] The variant that contained S95D and F93G mutations, denoted as D95/G93 (or “DG”), was used as a template in the second round of kₒₙ mutagenesis. Six single-mutation CDR libraries based on D95/G93 were constructed and screened for F protein binding. Single mutations that resulted in enhanced affinity for the F protein arising from kₒₙ improvements of the Fabs were identified. These mutations and the earlier identified mutations, S95D and F93G, are listed in FIG. 7B and Table 15. Due to the relative small increase in kₒₙ, we did not characterize in detail the kinetic constants of these single mutations. The mutation to proline at position 32 on HCDR1, which was identified earlier in the first affinity maturation attempt in the context of 493L1FR, was identified here for its ability to improve kₒₙ (FIG. 7). Similarly, the mutation to tyrosine at position 52 on LCDR2 was also identified previously. In summary, all four positions that yielded improvements in k_{off}, including positions 32 (HCDR1), 100 (HCDR3), 52 (LCDR2) and 93 (LCDR3) could also be mutated to improve kₒₙ. Three-dimensional structural modeling (data not shown) shows that kₒₙ mutations are located in a broad area covering the entire CDR regions. In contrast, the k_{off} mutations are restricted to four positions.

[0530] Combinatorial libraries of these kₒₙ mutations were constructed and screened; this then lead to the identification of Fab variants (Table 15) with mostly 4- to 5-fold improvements in kₒₙ compared to the palivizumab Fab (Table 16). To verify the binding specificity of these kₒₙ variants, several purified combinatorial Fab variants were tested in ELISA for binding to the F protein with the presence of palivizumab IgG; in addition, titrations of the purified combinatorial Fab variants for binding to immobilized F protein were carried out. All the variants tested competed with palivizumab. Typical ELISA titration curves are shown in FIG. 8C, and inhibition curves shown in FIG. 8D.

TABLE 16
Kinetics and viral neutralization of kₒₙ-improved antibodies.

| | Fab | | | IgG | | | Fab | IgG |
|---|---|---|---|---|---|---|---|---|
| Clone^{a} | kₒₙ(×10⁵) | k_{off}(×10⁻⁴) | K_{d} | kₒₙ(×10⁵) | k_{off}(×10⁻⁴) | | Microneutalization | |
| IC₅₀ | M⁻¹ₛ−1 | M⁻¹ₛ−1 | nM | M⁻¹ₛ−1 | M⁻¹ₛ−1 | K_{d} nM | μg/ml (nM)^{c} | |
| Palivizumab | 1.26 | 6.62 | 5.25 | 1.27 | 4.300 | 3.386 | 27.46 | 0.453 |
| | | | | | | | (549.2) | (3.02) |
| AFFF(1)^{b} | 1.34 | ≦0.05 | ≦0.037 | 1.27 | ≦0.05 | ≦0.039 | 0.0715 | 0.306 |
| | | | | | | | (1.43) | (2.04) |
| D95/G93^{c} | n.d. | n.d. | n.d. | n.d. | n.d. | n.d. | 0.126 | n.d. |
| | | | | | | | (2.52) | |
| A1e9 | 5.23 | 1.13 | 0.216 | 4.33 | 1.430 | 0.330 | 0.157 | 0.0625 |
| | | | | | | | (3.14) | (0.42) |
| A1h5 | n.d. | n.d. | n.d. | n.d. | n.d. | n.d. | 0.194 | n.d. |
| | | | | | | | (3.88) | |
| A3e2 | 5.99 | 0.94 | 0.157 | n.d. | n.d. | n.d. | n.d. | n.d. |
| A4b4 | 6.04 | 0.52 | 0.086 | 5.53 | 0.151 | 0.027 | 0.414 | 0.104 |
| | | | | | | | (0.83) | (0.069) |
| A8c7 | 6.47 | 3.00 | 0.464 | 4.17 | 0.875 | 0.210 | 0.177 | 0.0337 |
| | | | | | | | (3.54) | (0.22) |
| A12a6 | 5.19 | 2.19 | 0.422 | 4.60 | 0.165 | 0.036 | 0.0287 | 0.0357 |
| | | | | | | | (0.57) | (0.24) |
| A13a11 | 6.80 | 2.29 | 0.337 | n.d. | n.d. | n.d. | 0.0120 | n.d. |
| | | | | | | | (2.40) | |
| A13c4 | 6.50 | 1.12 | 0.172 | 3.00 | 0.396 | 0.132 | 0.0264 | 0.0376 |
| | | | | | | | (0.53) | (0.25) |
| A14a4 | 3.32 | 2.40 | 0.723 | n.d. | n.d. | n.d. | >0.4^{d} | n.d. |
| | | | | | | | (>8.0) | |
| A16b4 | 4.90 | 1.05 | 0.214 | n.d. | n.d. | n.d. | n.d. | n.d. |
| A17b5 | 5.90 | 0.73 | 0.124 | n.d. | n.d. | n.d. | 0.406 | n.d. |
| | | | | | | | (0.92) | |
| A17d4(1) | 5.31 | 0.59 | 0.111 | 4.56 | 0.407 | 0.089 | 0.0179 | 0.0342 |
| | | | | | | | (0.36) | (0.23) |
| A17f5 | 5.44 | 0.84 | 0.154 | n.d. | n.d. | n.d. | 0.106 | n.d. |
| | | | | | | | (2.12) | |
| A17h4 | 5.19 | 1.05 | 0.202 | n.d. | n.d. | n.d. | n.d. | n.d. |
| P11d4 | 5.70 | 3.89 | 0.682 | 4.66 | 2.890 | 0.620 | 0.292 | 0.0217 |
| | | | | | | | (5.84) | (0.14) |
| P12f2 | 5.35 | 0.72 | 0.135 | 4.07 | 1.280 | 0.314 | 0.0407 | 0.0231 |
| | | | | | | | (0.81) | (0.15) |
| P12f4 | n.d. | n.d. | n.d. | 4.95 | 0.555 | 0.112 | 0.0464 | 0.242 |
| | | | | | | | (0.93) | (0.16) |
| ^{a}Several antibodies were analyzed by surface plasma resonance on several occasions. The average kₒₙ values with standard deviations and the number of independent measurements (n) of these antibodies are shown below: Palivizumab IgG, 1.27 ± 0.33 × 10⁵ (n = 6); AFFF(1) IgG, 1.27 ± 0.31 × 10⁵ (n = 4); A4b4 IgG, 5.53 ± 1.63 × 10⁵ (n = 3); A3e2 | | | | | | | | |
| # Fab, 5.99 ± 0.20 × 10⁵ (n = 2); A4b4 Fab, 6.04 ± 2.67 × 10⁵ (n = 2); A13c4 Fab, 6.50 ± 1.43 × 10⁵ (n = 5); A16b4 Fab, 4.90 ± 0.00 × 10⁵ (n = 2); A17b5 Fab, 5.90 ± 0.35 × 10⁵ (n = 2); A17d4(1), 5.31 ± 0.17 × 10⁵ (n = 2); A17f5 Fab, 5.44 ± 0.38 × 10⁵ (n = 2). | | | | | | | | |

^{b}The k_{off}-combinatorial clone, AFFF(1), is included for comparison purpose.
^{c}The kinetics constants of D95/G93 were not characterized in detail due to the small relative increase in kₒₙ.
^{d}Fab A14a4 were tested in a RSV microneutralization assay at a concentration up to 0.4 μg/ml, and no inhibition of viral replication was observed. Higher concentrations were not tested since it was clear that this Fab variant was not the best among these combinatorial clones.
^{e}For comparison purpose, the IC₅₀ values were converted to nM unit and are shown in parenthesis.

[0531] The building of the improvement in kₒₙ in AFFF(1) significantly diminished the improvement in k_{off}. AFFF(1) Fab has a k_{off} two log better than that of the palivizumab Fab; while these kₒₙ combinatorial Fabs have a k_{off} only 2- to 13-fold better. This result was not surprising because some of the beneficial k_{off} mutations in AFFF(1) were replaced with kₒₙ mutations in these combinatorial clones. For example, clone P11d4 has the worst k_{off} among this group (Table 16), and all of its k_{off} mutations, such as A at position 32 on HCDR1, F at position 100 on HCDR3, F at position 52 on LCDR2 and F at position 93 on LCDR3, were replaced (Table 15).

[0532] Several combinatorial clones were converted to full-length IgG1/kappa antibodies for further characterization. The converted full-length antibodies still retained the improved kₒₙ although these improvements were slightly reduced. This may be due to variations in BIAcore measurements, but is also possibly caused by the conversion to IgG. The IgG conversion does improve the k_{off} 3- to 13-times through increased avidity in some, but not all, of the converted antibodies. Marked improvements were seen with A4b4, A8c7, A12a6, and A13c4 but in contrast, with palivizumab and some variants, such as A1e9, A17d4(1), P11d4, and P12f2, there were only minor improvements in k_{off} upon conversion to IgG (Table 16). Palivizumab, A4b4 and AFFF(1) in the Fab and IgG format were further characterized for their binding to RSV-infected cells that expressed F protein on the cell surface (FIGS. 11C and D). ELISA titrations showed that both A4b4 and AFFF(1) bound substantially better than palivizumab to acetone-fixed HEp-2 cells infected with RSV Long. This increase in binding was similar to that observed in BIAcore analysis for their binding to immobilized F protein (Tables 14 and 16). The same antibodies were also titrated on affinity-purified recombinant F protein (FIGS. 11A and B). The binding profiles of these antibodies (whether in Fab or IgG format) were very similar whether assayed against purified F protein or cell-expressed F protein. In addition, a preliminary study by flow cytometry was conducted to measure the binding of palivizumab, A4b4 and AFFF(1) IgGs at 3 μg/ml to RSV-infected HEp-2 cells. The ability of the antibody to bind to the infected cells as measured by mean channel fluorescence correlated well with the ELISA titration results (FIG. 12).

Functional Characterization of kₒₙ-Improved Palivizumab Variants

[0533] Most of the combinatorial Fab variants selected by improvement of kₒₙ have a 4- to 5-fold better kₒₙ and a 2- to 13-fold better k_{off} than the parent clone, palivizumab Fab. Furthermore, the optimization of kₒₙ greatly improved the ability to neutralize virus relative to that of the parent clone. The improvement in neutralization activity for kₒₙ-improved Fab variants is, in general, substantially better than that of k_{off}-improved variants (Tables 14 and 16). Whilst the best k_{off}-improved Fab, AFFF(1), has a 384-fold improvement, the neutralization activity of seven out of fourteen characterized kₒₙ-improved Fab variants is improved beyond that of AFFF(1). The variant A17d4(1) Fab has a 1,534-fold better IC₅₀ than the palivizumab Fab. Variants A12a6 and A13c4 have about 1000-fold improvements, and variant A4b4, A17b5, P12f2 and P12f4 have about 600- to 700-fold improvement (Table 16 and FIG. 9C). Six out of these seven best Fab variants retain their beneficial k_{off} mutation, phenylalanine, at position 100 on HCDR3 (Table 15). For kₒₙ-improved variants in the Fab format, k_{off} appeared to contribute to the differences in their IC₅₀. For example, clone P11d4 with a similar kₒₙ to others has the fastest k_{off} value and one of the worst IC₅₀. Clone A17d4(1) has nearly the slowest k_{off} value among these variants, and its IC₅₀ is also the best (Table 16). When these kₒₙ-improved clones were converted to full-length antibodies, they continued to exhibit much higher ability to neutralize virus compared to palivizumab IgG (Table 16 and FIG. 9D). This result contrasts dramatically with the result obtained using k_{off}-combinatorial variants, where the functional improvement largely disappeared after IgG conversion (Table 14 and FIG. 9B). The best intact antibody overall in terms of the ability to neutralize virus in vitro is A4b4 (Table 16 and FIG. 6). The full-length A4b4 antibody has a 27 pM affinity for RSV F protein as estimated by BIAcore analysis, representing a 125-fold improvement over that of palivizumab. A4b4 IgG also exhibits a 44-fold greater potency in the microneutralization assay as compared to palivizumab. These K_{d} and IC₅₀ numbers are averages from at least two independent experiments. Detailed analysis of the data in Table 16 revealed that in one variant, P11d4,conversion of the Fab into IgG did not give rise to a significant improvement in k_{off}. Thus, the k_{off} and kₒₙ of P11d4 IgG are similar to those of its Fab fragment, yet the IC₅₀ of the IgG form is 42-fold better than that of the Fab fragment (5.84 nM for Fab vs. 0.14 nM for IgG). This large improvement in IC₅₀ upon conversion to IgG, without a concomitant increase in avidity, is similar to that observed upon conversion of the Fab form of palivizumab to IgG. In contrast, clone A12a6 exhibited a 13-fold improvement in k_{off} upon IgG conversion presumably due to avidity effect; however, this avidity improvement did not result in substantial improvement in the ability to neutralize virus (IC₅₀ 0.57 nM for Fab, and 0.24 nM for IgG). We also observed that, in general, variants that already had gained large improvements in IC₅₀ in the Fab format tended to gain less improvement in the values of IC₅₀ upon conversion to IgG; such examples are variants A12a6, A13c4 and A17d4(1) (Table 16). Their IC₅₀ values in Fab format are 0.36 to 0.57 nM which are about 1,000-1,500-fold better than that of palivizumab Fab. After conversion to IgG, their IC₅₀ are 0.23 to 0.25 nM, only a two-fold increase over the Fab forms. In contrast, variants such as A8c7 and P11d4 have IC₅₀ values of 3.54 nM and 5.84 nM respectively, which are about 94-155-fold better than that of palivizumab Fab (Table 16). Once converted to IgG, the values of the IC₅₀ are 0.22 and 0.14 nM, a 16-42-fold increase over the Fab form. A similar observation was made for the k_{off}-improved variants (Table 14).

### Discussion

[0534] Using a very efficient directed evolution approach based on phage expression (Wu et al. (1998) Proc. Natl. Acad. Sci. USA, 95, 6037-6042), we have fully humanized palivizumab, restored the unnatural residues on its LCDR1 to parental murine residues, and identified many variants with great improvements in k_{off} without the need for structural information. All k_{off}-beneficial mutations located on HCDR3 (W100F), LCDR2 (S52F, and S52Y), and LCDR3 (G93F, G93Y, and G93W) share one common feature: an aromatic side chain (FIG. 7A). Perhaps these mutations are engaged in aromatic stacking with the RSV F protein. However, examination of the palivizumab binding site on the F protein, which spans from position 260 to 275 as predicted by antibody-resistant RSV mutants (Crowe et al. (1998) Virology, 262,373-375; Zhao et al. (2004) Virology, 318, 608-612) reveals no aromatic side chains that would favor such an interaction. Although these aromatic amino acids may interact with residue(s) adjacent to the binding site, in the absence of co-crystal structural information this interpretation remains speculative.

[0535] The combinatorial Fab variants containing three to four beneficial k_{off} mutations have an affinity at least 117-fold higher than that of the palivizumab Fab, and this results in a concomitant improvement in their ability to neutralize RSV virus to at least 110-fold higher (Table 14). However, once we converted these anti-RSV Fab variants into whole IgG molecules, the ideal drug format, the difference in potency largely disappeared (Table 14 and FIG. 10B), despite the fact that those IgG variants with a ≦5×10⁻⁶ s⁻¹ k_{off} still exhibit much higher affinities than palivizumab (Table 14: footnote c). The primary reason for the dramatic reduction in relative potencies is that palivizumab upon conversion from Fab to IgG was found to undergo a two-log increase in in vitro potency; in contrast, when some of the variants were converted to IgG no increase in potency was observed (Table 14, FIGS. 10A and B). For example, the IC₅₀ of palivizumab Fab is 549.2 nM, and that for palivizumab IgG is 3.02 nM, reflecting a 182-fold increase due to conversion to IgG. In contrast, the variant AFFF(1) Fab and IgG have IC₅₀ values of 1.43 nM and 2.04 nM respectively. Conversion of this k_{off}-improved variant from Fab to IgG confers no IC₅₀ improvement. The increase in avidity arising from the bivalency of the IgG does not explain the increase in neutralization shown by palivizumab IgG, since the K_{d} (and k_{off}) of palivizumab improved only minimally upon conversion to the IgG format; in contrast, the variant AFFF(1) as an IgG has an almost two-log higher binding avidity over palivizumab IgG but shows less than a 2-fold improvement in IC₅₀ (Table 14).

[0536] Due to these unexpected results from the k_{off}-improved clones, we decided to improve the kₒₙ of palivizumab. The best k_{off} variant, AFFF(1), was selected as the starting molecule for further engineering. Through iterative CDR mutations and screening, many beneficial kₒₙ single mutations were identified. As observed in this study and some earlier reports,^{12,20} selected k_{off} single mutations typically improve k_{off} 2- to 13-fold. In contrast, in this study kₒₙ single mutations were found to improve kₒₙ by only 20-80% (data not shown). After combining several kₒₙ mutations, the kₒₙ was improved overall up to 5-fold (Table 16). All of these combinatorial clones still showed improvement in their k_{off} though at a much reduced level. Fortunately, these kₒₙ-improved variants have shown great potency enhancement in both Fab and IgG formats (Table 16, FIGS. 10C and D).

[0537] To dissect the impact of antibody binding kinetics on the ability to neutralize virus, as indicated by IC₅₀, we analyzed the entire data set in Tables 14 and 16. We found a strong correlation between k_{off} and IC₅₀ for k_{off}-improved Fab variants (FIG. 10A). Moreover, for Fab fragments, we observed that both k_{off} and kₒₙ influence viral neutralization. However, kₒₙ appears to play a much more significant role in the enhancement of the ability to neutralize virus. Examples of this are the Fab variants W100F and A17f5. Both have an 8-fold improvement in k_{off}, and A17f5 has an additional 3-fold increase in kₒₙ over W100F. The 8-fold k_{off}-improvement resulted in an 11-fold improvement in IC₅₀ for W100F. However, the additional 3-fold increase in kₒₙ resulted in an additional 25-fold improvement in IC₅₀ for A17f5. A similar comparison can be made between variants S52Y and A1e9 with palivizumab Fab.

[0538] For full-length antibodies, kₒₙ maintains its influential role on IC₅₀ while the impact of k_{off} appears to be much less. When compared to palivizumab (Table 16), all the k_{off}-combinatorial IgG variants, such as AFFF(1), AFFY, and AFFG, exhibited much higher avidity, driven by 100-fold improvement in k_{off} (Table 14: footnote c), yet their IC₅₀ values show almost no improvement over that of palivizumab (Table 14). In addition, the kₒₙ-improved IgG clones, P11d4, P12f2, and P12f4, all have similar kₒₙ values but distinctive k_{off} values, ranging from 5.55×10⁻⁵ to 2.89×10⁻⁴ s⁻¹, but these differences in k_{off} did not result in differences in IC₅₀ (Table 16). In contrast, the kₒₙ-combinatorial IgG variant, P11d4, exhibits a 4-fold improvement in kₒₙ and only a slightly better k_{off} than palivizumab (2.89×10⁻⁴ vs. 4.3×10⁻⁴ s⁻¹), yet its IC₅₀ is dramatically increased 21-fold over palivizumab. This improvement in IC₅₀ is attributed largely to its kₒₙ improvement. It should be noted however, that when kₒₙ has already been improved, additional substantial improvement in k_{off} may confer an added beneficial effect on IC₅₀. An example of this is A4b4 IgG which has a 4-fold kₒₙ (similar to other kₒₙ clones) and 28-fold k_{off} improvement over palivizumab, and its IC₅₀ is increased 44-fold, indicating that k_{off} can influence the ability of kₒₙ-improved intact antibodies to neutralize virus. Our finding that kₒₙ plays a predominant role in RSV viral neutralization may be explained by the possibility that antibodies with higher kₒₙ values can bind to the virus more quickly and thus neutralize it before the virus has the chance to infect cells. However, we cannot rule out other possibilities since the mechanism by which palivizumab blocks RSV infection at the molecular level is still not well understood.

[0539] We also observed that the IC₅₀ values of palivizumab and all the k_{off}-improved variants appeared to converge to ˜3 nM upon conversion to IgG despite differences in k_{off} that ranged from ≦5×10⁻⁶ to 4.3×10⁻⁴ s⁻¹ (Table 14 and FIG. 10B). These clones, including palivizumab, have similar kₒₙ values at ˜1×10⁵ M⁻¹s⁻¹ in both Fab and IgG formats. A similar behavior was also observed for the kₒₙ-improved variants where the IC₅₀ values for all the characterized kₒₙ variants converged to ˜0.1-0.2 nM upon conversion to IgG despite differences in k_{off} that ranged from 1.51×10⁻⁵ to 2.890×10⁻⁴ s⁻¹ (Table 16 and FIG. 10D). The kₒₙ values of these clones are similarly improved to ˜5×10⁵ M⁻¹s⁻¹ in Fab formats and ˜4×10⁵ M⁻¹s⁻¹ in IgG formats. Overall, for full-length antibodies, a 4-fold improvement in kₒₙ leads to a 15- to 30-fold improvement in the ability to neutralize virus regardless of the differences in k_{off}.

[0540] Based on our observations, two major factors appear to affect the IC₅₀ of intact antibodies in viral neutralization: kₒₙ and the bivalency of IgG. The influence of k_{off} differs substantially between the Fab and IgG formats, with a strong influence on the IC₅₀ in Fabs but with little effect on the IC₅₀ as IgG molecules. However, this conclusion should be limited to molecules with k_{off} below that of palivizumab. Palivizumab IgG has a k_{off} of 4.3×10⁻⁴ s⁻¹, which results in a theoretical dissociation half-life of the antigen-antibody complex of 27 minutes, as calculated by the formula T_{1/2}=ln 2/k_{off}. It is possible that the contribution of k_{off} to viral neutralization is already at its maximum in palivizumab, and therefore, further improvements in the off-rate in variants simply cannot further increase the neutralization activity. For Fabs, which bind monovalently and are smaller in size, the k_{off} threshold required to effectively neutralize RSV may be elevated, and thus this may explain why we observed a significant role for k_{off} in the IC₅₀ of Fab variants.

[0541] As discussed earlier, upon the conversion of k_{off}- versus kₒₙ-improved variants from Fab to IgG we observed generally differences in their ability to neutralize virus (FIG. 9). The conversion from Fab to IgG increases both antibody size and the binding valence. To understand the contribution of these changes to viral neutralization, we prepared F(ab′)₂ fragments of palivizumab and one of its variants, and tested them in the microneutralization assay. In this study, the IC₅₀ values derived from averages of two independent experiments for palivizumab and its F(ab′)₂ are 3.6 and 1.4 nM respectively, and for the variant and its F(ab′)₂ are 0.23 and 0.15 nM respectively. We did not observe large differences in the IC₅₀ values for both of the F(ab′)₂ constructs compared to their respective parental IgG despite that their size was reduced from 150 kD to 100 kD. This indicates that antibody size in this range does not significantly affect viral neutralization. This suggests that the ability to bind bivalently as one of the causes for the change in IC₅₀ values upon conversion of Fab to IgG. AFFF(1) and other combinatorial k_{off} variants as IgG have much higher avidities than palivizumab, but all these molecules have similar IC₅₀ values as palivizumab. Bivalent binding appears to be able to influence viral neutralization through a mechanism unrelated to avidity. In another example, conversion of palivizumab or the variant, P11d4, from Fab to IgG, did not significantly alter the values of K_{d}, but did improve the IC₅₀ values 42- to 182-fold over their respective Fab fragments. This suggests that avidity is not playing a role, but still bivalent binding does alter viral neutralization. It is possible that we did not see a good correlation between antibody avidity and viral neutralization because the avidity values were measured by surface plasma resonance on immobilized F protein. In this artificial system, the viral epitopes displayed on the surface of sensor chip may not completely mimic natural presentation of such an epitope on the virions or the virus-infected cell surface expressing F protein. It is also possible that the Fab and IgG versions of the same antibody neutralize virus through different mechanisms, and this may account for the differences in RSV neutralization that were observed when palivizumab Fab variants were converted into IgGs.

### 6.9 Prophylaxis of Upper Respiratory Tract RSV Infection in Cotton Rats by A4B4L1FR-S28R (MEDI-524)

[0542] Intramuscular dosing studies were conducted in cotton rats to compare the efficacy of A4B4L1FR-S28R (MEDI-524) and palivizumab in reducing upper respiratory tract RSV infection. For each experiment, juvenile cotton rats (Sigmodon hispidus, average weight 100 g) were separated into six groups of ten animals each, two groups each for MEDI-524, palivizumab, and bovine serum albumin (BSA) control. Animals were anesthetized with methoxyflurane and given 0.2 ml of purified mAb or BSA by intramuscular injection (i.m.), one group at 2.0 mg/kg body weight and one group at 20.0 mg/kg body weight for each test article. Twenty four hours later, animals were again anesthetized, bled for serum IgG quantitation, and challenged by intranasal instillation (i.n.) of 1×10⁵ pfu/animal RSV (Long strain). Four days later animals were sacrificed and their lungs and nasal turbinates were harvested. Lung and nasal turbinate homogenates were prepared in Hank's balanced salt solution (HBSS) and the resultant suspensions were used to determine viral titers by plaque assay utilizing confluent HEp-2 cells. Serum human IgG titers at the time of challenge, as well as lung homogenate and nasal turbinate homogenate human IgG titers at the time of sacrifice, were determined by an anti-human IgG-specific ELISA as described in Section 5.1.4.

[0543] Results of two cotton rat prophylaxis experiments are presented in Tables 17 and 18, infra, and in FIGS. 5A and 5B, supra. The results of these studies show that when administered at equivalent doses, MEDI-524 and palivizumab attain equivalent levels in the serum, lungs, and nasal turbinates of cotton rats. At a dose of 2 mg/kg MEDI-524 effected a 50-100-fold greater reduction in upper respiratory RSV Long titers than did palivizumab. MEDI-524 reduced the nasal turbinate RSV titers by greater than 99% (>2 logs) as compared to the BSA control, while palivizumab effected only a 60% -80% (<1 log) reduction in nasal turbinate RSV.

TABLE 17
Intramuscular Prophylaxis of RSV (Long) Upper Respiratory Tract
Infection in Cotton Rats.

| | | | | | Lung Viral | Nasal Viral |
|---|---|---|---|---|---|---|
| | | Serum Human | Lung Human | Nasal Human | Titer | Titer |
| | | IgG at | IgG at | IgG at | Geometric | Geometric |
| | | Challenge, | Sacrifice | Sacrifice | Mean ± Std | Mean ± Std |
| | Dose | Mean ± Std | Mean ± Std | Mean ± Std | Error (log₁₀ | Error (log₁₀ |
| Treatment | (mg/kg) | Error (μg/ml) | Error (μg/ml) | Error (μg/ml) | pfu/g) | pfu/g) |
| MEDI-524 | 2 | 20.7 ± 2.4 | 0.258 ± 0.114 | 0.169 ± 0.036 | <2.0 ± 0.0* | 2.3 ± 0.5 |
| SYNAGIS | 2 | 16.1 ± 4.4 | 0.182 ± 0.080 | 0.126 ± 0.037 | 2.3 ± 0.3 | 4.4 ± 0.1 |
| BSA | 2 | 0.0 | 0.0 | 0.0 | 5.0 ± 0.3 | 5.1 ± 0.3 |
| MEDI-524 | 20 | 213.0 ± 71.7 | 2.0 ± 0.8 | 1.2 ± 0.6 | <2.0 ± 0.0* | <2.0 ± 0.0* |
| SYNAGIS | 20 | 166.0 ± 54.9 | 1.8 ± 0.9 | 1.1 ± 0.3 | <2.0 ± 0.0* | 2.1 ± 0.1 |
| BSA | 20 | 0.0 | 0.0 | 0.0 | 4.9 ± 0.4 | 5.1 ± 0.3 |

*Viral titers for all animals in this group were <100 pfu/gm, the lower limit of detection for the plaque assay.

[0544] TABLE 18
Prophylaxis of RSV (Long) Upper Respiratory Tract Infection in Cotton Rats

| | | Serum Human | Lung Human | Nasal Human | Lung Viral Titer | Nasal Viral Titer |
|---|---|---|---|---|---|---|
| | | IgG at | IgG at | IgG at | Geometric | Geometric |
| | Dose | Challenge, | Sacrifice | Sacrifice | Mean ± Std | Mean ± Std |
| | (mg/ | Mean ± Std | Mean ± Std | Mean ± Std | Error (log₁₀ | Error (log₁₀ |
| Treatment | kg) | Error (μg/ml) | Error (μg/ml) | Error (μg/ml) | pfu/g) | pfu/g) |
| MEDI-524 | 2 | 12.0 ± 1.9 | 0.246 ± 0.050 | 0.123 ± 0.016 | <2.0 ± 0.0* | 3.2 ± 0.5 |
| SYNAGIS | 2 | 15.8 ± 1.2 | 0.250 ± 0.057 | 0.118 ± 0.012 | <2.0 ± 0.0* | 4.9 ± 0.4 |
| BSA | 2 | 0.0 | 0.0 | 0.0 | 4.5 ± 0.1 | 5.3 ± 0.2 |
| MEDI-524 | 20 | 151.6 ± 41.8 | 2.7 ± 0.5 | 1.3 ± 0.1 | <2.0 ± 0.0* | <2.0 ± 0.0* |
| SYNAGIS | 20 | 149.2 ± 25.6 | 2.3 ± 0.4 | 1.1 ± 0.1 | <2.0 ± 0.0* | 2.3 ± 0.4 |
| BSA | 20 | 0.0 | 0.0 | 0.0 | 4.6 ± 0.4 | 5.1 ± 0.2 |

*Viral titers for all animals in this group were <100 pfu/gm, the lower limit of detection for the plaque assay.

### Results

[0545] The results of these experiments indicate that MEDI-524, compared to palivizumab, is more effective in preventing upper respiratory tract infections in vivo, as demonstrated by the experiments performed in the cotton rat experimental model and summarized in Tables 17 and 18, and FIGS. 5A and 5B. At a dose of 2 mg/kg, MEDI-524 effected a 50-100-fold greater reduction in upper respiratory RSV Long titers than did palivizumab. Further, MEDI-524 reduced the nasal turbinate RSV titers by greater than 99% (>2 logs) as compared to the BSA control, while palivizumab effected only a 60%-80% (<1 log) reduction in nasal turbinate RSV.

[0546] These results have important implications for the prevention of upper respiratory tract infections in humans, particularly in infants, and also for the prevention of the development of lower respiratory tract infections (generally affecting the lungs) from upper respiratory tract infections. It is estimated that 30-50% of infants are affected by lower respiratory infections caused by RSV. The use of MEDI-524 would be beneficial because it is significantly more potent at preventing upper respiratory tract infections at a lower dose than palivizumab. It is anticipated that such findings will result in a lower rate of upper and lower respiratory tract infections in infants, as well as a decrease in the number of physician visits.

### 6.10 Intramuscular Cotton Rat Studies

[0547] This experiment demonstrates that a greater reduction in RSV titer is achieved when A4b4, A4b4-F52S or A4b4/L1FR-S28R is administered intramuscularly to a cotton rat than when the same concentration of palivizumab is administered intramuscularly to a cotton rat.

### Materials & Methods

Intramuscular Cotton Rat Prophylaxis

[0548] Cotton rats (S. hispidus, average weight 100 grams) were anesthetized with methoxyflurane and dosed with 0.1 ml of purified monoclonal antibody (mAb) or BSA control by intramuscular (i.m.) injection. Twenty-four hours later animals were again anesthetized, bled for serum mAb concentration determination, and challenged with 10⁵ PFU RSV long by intranasal (i.n.) instillation. Four days later animals were sacrificed, serum samples were obtained, and their lungs were harvested. Lungs were homogenized in 10 parts (wt/vol) of Hanks Balanced Salt solution and the resultant suspension was used to determine pulmonary viral titers by plaque assay.

Intramuscular Cotton Rat Pharmacokinetics

[0549] Cotton rats (S. hispidus, average weight 100 grams) were anesthetized with methoxyflurane and dosed with 0.1 ml of purified mAb or BSA control by intramuscular (i.m) injection. Twenty-four hours later all of the animals were bled for serum mAb concentration determination, and half of the animals from each group were sacrificed to perform bronchoalveolar lavage (BAL). Four days later the remaining animals were sacrificed, serum samples were obtained and BAL performed.

### Results

[0550] As shown in Tables 19-21, a greater reduction in RSV titer is achieved with equivalent or lower lung levels of A4b4, A4b4-F52S, or A4b4/L1FR-S28R as with palivizumab.

TABLE 19
Intramuscular Cotton Rat Prophylaxis Data

| | | | mg/kg | | | 0.125 | mg/kg | |
|---|---|---|---|---|---|---|---|---|
| | Serum | 0.5 | Virus | log | | Lung | Virus | log |
| | IgG | Lung IgG | Titer | Virus | Serum IgG | IgG | Titer | Virus |
| | (μg/ml) | (μg/ml) | (pfu/gm) | Titer | (μg/ml) | (μg/ml) | (pfu/gm) | Titer |
| SYNAGIS | 3.4 | 0.099 | 7.3 × 10³ | 3.9 | 0.893 | 0.024 | 3.1 × 10⁴ | 4.5 |
| A4b4-F52S | 2.9 | 0.089 | 7.3 × 10² | 2.9 | 0.781 | 0.020 | 8.6 × 10³ | 3.9 |
| A4b4/L1F | 3.3 | 0.093 | 6.1 × 10² | 2.8 | 0.748 | 0.016 | 2.3 × 10⁴ | 4.4 |
| R-S28R | | | | | | | | |
| BSA | | | 5.9 × 10⁴ | 4.8 | | | | |

[0551] TABLE 20
Intramuscular Cotton Rat Prophylaxis Data

| | 0.5 | mg/kg | log(10) | 1 | mg/kg | log(10) |
|---|---|---|---|---|---|---|
| | Serum IgG | Lung IgG | | Serum IgG | Lung IgG | |
| Molecule | (μg/ml) | (μg/ml) | Lung Virus | (μg/ml) | (μg/ml) | Lung Virus |
| A4b4 | 2.4 | 0.013 | 4.3 | 3.1 | 0.094 | 3.4 |
| SYNAGIS | 1.9 | 0.038 | 4.4 | 4.2 | 0.212 | 3.3 |
| BSA | | | | | | 4.4 |

[0552] TABLE 21
Intramuscular Cotton Rat Pharmacokinetics Data

| | 24 Hours | | 96 Hours | |
|---|---|---|---|---|
| | Serum IgG | BAL IgG | Serum IgG | BAL IgG |
| Molecule | (μg/ml) | (ng/ml) | (μg/ml) | (ng/ml) |
| A4b4 | 3.4 | 2.2 | 2.6 | 1.4 |
| SYNAGIS | 4.1 | 5.3 | 2.8 | 3.5 |

### 6.11 Clinical Trials

[0553] Antibodies of the invention tested in in vitro assays and animal models may be further evaluated for safety, tolerance and pharmacokinetics in groups of normal healthy adult volunteers. The volunteers are administered intramuscularly, intravenously or by a pulmonary delivery system a single dose of 0.5 mg/kg, 3 mg/kg, 5 mg/kg, 10 mg/kg, 15 mg/kg, 30 mg/kg, 45 mg/kg, or 60 mg/kg of an antibody of the invention which immunospecifically binds to a RSV antigen (e.g., RSV F antigen). Each volunteer is monitored at least 24 hours prior to receiving the single dose of the antibody and each volunteer will be monitored for at least 48 hours after receiving the dose at a clinical site. Then volunteers are monitored as outpatients on days 3, 7, 14, 21, 28, 35, 42, 49, and 56 postdose.

[0554] Blood samples are collected via an indwelling catheter or direct venipuncture using 10 ml red-top Vacutainer tubes at the following intervals: (1) prior to administering the dose of the antibody; (2) during the administration of the dose of the antibody; (3) 5 minutes, 10 minutes, 15 minutes, 20 minutes, 30 minutes, 1 hour, 2 hours, 4 hours, 8 hours, 12 hours, 24 hours, and 48 hours after administering the dose of the antibody; and (4) 3 days, 7 days 14 days, 21 days, 28 days, 35 days, 42 days, 49 days, and 56 days after administering the dose of the antibody. Samples are allowed to clot at room temperature and serum will be collected after centrifugation.

[0555] The antibody is partially purified from the serum samples and the amount of antibody in the samples will be quantitated by ELISA. Briefly, the ELISA consists of coating microtiter plates overnight at 4° C. with an antibody that recognizes the antibody administered to the volunteer. The plates are then blocked for approximately 30 minutes at room temperate with PBS-Tween-0.5% BSA. Standard curves are constructed using purified antibody, not administered to a volunteer. Samples are diluted in PBS-Tween-BSA. The samples and standards are incubated for approximately 1 hour at room temperature. Next, the bound antibody is treated with a labeled antibody (e.g., horseradish peroxidase conjugated goat-anti-human IgG) for approximately 1 hour at room temperature. Binding of the labeled antibody is detected, e.g., by a spectrophotometer.

[0556] The concentration of antibody levels in the serum of volunteers are corrected by subtracting the predose serum level (background level) from the serum levels at each collection interval after administration of the dose. For each volunteer the pharmacokinetic parameters are computed according to the model-independent approach (Gibaldi et al., eds., 1982, Pharmacokinetics, 2^{nd} edition, Marcel Dekker, New York) from the corrected serum antibody concentrations.

### 6.12 Phase 1 Clinical Trial of MEDI-524 in Healthy Adults

[0557] Background: RSV is a pathogen of infants and young children, causing annual epidemics of bronchiolitis and pneumonia worldwide and hospitalizations in approximately 2% of infected infants. Premature infants, infants with chronic lung disease (CLD) of prematurity, and infants with hemodynamically significant congenital heart disease are hospitalized 4-5 times more frequently and sustain increased morbidity and mortality compared to infants without these risk factors. Palivizumab (palivizumab), a humanized RSV monoclonal antibody directed against the F glycoprotein of RSV, is currently FDA-approved for the passive immunoprophylaxis of serious acute RSV disease in high-risk children. MEDI-524 has 20-100 fold increased activity against RSV in pre-clinical studies. The cotton rat model of RSV was used to select the palivizumab dose (15 mg/kg monthly) evaluated in efficacy trials. This dose was chosen in order to achieve a serum concentration that, in the cotton rat, was associated with a 2 log₁₀ reduction in pulmonary RSV. Prophylaxis of high-risk children with this dose resulted in ˜50% overall reduction in RSV hospitalization rates compared to placebo.

[0558] As described elsewhere herein, MEDI-524 is an enhanced potency RSV-specific monoclonal antibody derived by in vitro affinity maturation of the complementarity-determining regions of the heavy and light chains of palivizumab. Preclinical data demonstrate that MEDI-524's affinity to the F protein of RSV (BIAcore) is ˜70-fold higher compared to palivizumab, and MEDI-524 is ˜20-fold more potent in microneutralization studies. Studies in the cotton rat model, which are described in prior examples herein, demonstrate that, at comparable serum concentrations, MEDI-524 has 50-100 times greater anti-viral activity against RSV compared to palivizumab in the lower respiratory tract. In addition, MEDI-524 reduces RSV in the upper respiratory tract by 2-3 logs, whereas palivizumab has minimal effect.

[0559] Objective: This was an initial dosage study of MEDI-524 to evaluate its safety, immunogenicity, and pharmacokinetics (PK) in healthy adults.

[0560] Design/Methods: Healthy adults were separated into five treatment groups, with each treatment group containing 6 healthy adults. Groups 1-3 received MEDI-524 as a single IV dose of 3, 15, or 30 mg per kg of patient body weight, respectively. Group 4 received MEDI-524 as a single IM dose of 3 mg/kg IM. Group 5 received MEDI-524 as two doses of 3 mg/kg IM on days 0 and 30. Group 6 received a placebo.

[0561] A safety follow-up was conducted at 60 days following the final dose. PK and immunogenicity follow-up was conducted for 180 days following the final dose.

### Results

[0562] Safety: MEDI-524 was well-tolerated in all groups (4 SOIs), and there were no dose-limiting toxicities or serious adverse effects (SAEs) reported.

[0563] Pharmokinetics: The mean half-life of antibody was 15-18 days. Mean serum MEDI-524 trough concentrations of Groups 1-3 are presented in FIG. 14. The mean half-life was calculated to be 15-18 days.

[0564] Immunogenicity: Thirteen percent of patients had and anti-idiotype response. However, the anti-idiotypic response was not associated with and adverse events.

### Discussion

[0565] Conclusions: These results suggest that MEDI-524 is both safe and effective at these tested doses, and that follow-up repeat dosing studies are appropriate.

### 6.13 Phase 1/2 Repeat Dosing MEDI-524 Clinical Trial in High-Risk Children

[0566] Objective: This was a dose escalation, repeat dose study of MEDI-524 to evaluate its safety, immunogenicity, and pharmacokinetics (PK) in high risk children.

[0567] This study was the first trial of MEDI-524 conducted in a pediatric population. It was designed to describe the safety, tolerability, immunogenicity, and pharmacokinetics of escalating, repeated intramuscular (IM) injections of MEDI-524 during the RSV season in children with prematurity or CLD of prematurity.

[0568] Design/Methods: Preterm infants, GA 32-35 weeks (wks), age≦6 months (m) received monthly IM doses of MEDI-524 at 3 mg/kg (N=6) or 15 mg/kg (N=24). Subsequently, infants≦2 years with CLD of prematurity were included to receive 15 mg/kg. Clinical/lab adverse events (AEs), immunogenicity, and PK were evaluated through 150 days after final dose.

[0569] This was an open-label, Phase 1/2, dose-escalation study conducted during the respective RSV seasons in the northern and southern hemispheres. Children received at least 2 and up to 5 doses of study drug, given 30 days apart, depending on when in the RSV season a child was enrolled in the study.

TABLE 22
Subjects Enrolled and Treatments Administered

| Group | Treatment | IM Dosage | N | Subjects |
|---|---|---|---|---|
| 1 | MEDI-524 | 3 mg/kg | 6 | premature (≧32 to ≦35 weeks gestation) ≦6 |
| | | | | months of age |
| 2 | MEDI-524 | 15 mg/kg | 24^{a} | premature (≧32 to ≦35 weeks gestation) ≦6 |
| | | | | months of age |
| 3 | MEDI-524 | 15 mg/kg | 187^{b} | premature (≧32 to ≦35 weeks gestation) ≦6 |
| | | | | months of age OR ≦24 months of age with |
| | | | | CLD of prematurity, with stable or |
| | | | | decreasing doses of diuretics, steroids, or |
| | | | | bronchodilators within the previous 6 |
| | | | | months. |

^{a}Six children were enrolled; following acceptable safety review, the remaining 18 were enrolled
^{b}Following acceptable safety review of Groups 1 and 2, enrollment in Group 3 was begun

[0570] Evaluations are described in Table 23. Cumulative review of available safety data for all children was performed by the Medical Monitor, with a report submitted to the Safety Monitoring Committee every 30 days. Adverse events (AEs) included any adverse change from baseline condition, regardless of relationship to study drug. Serious adverse events (SAEs) included those that resulted in death; were life-threatening; resulted in inpatient hospitalization or prolongation of existing hospitalization; resulted in persistent or significant disability or incapacity; or were an important medical event. MEDI-524 serum concentrations (limit of detection 1.56 μg/mL) and immunogenicity were assayed using ELISA. For the detection of immune reactivity, wells were coated with MEDI-524 with the detection reagent consisting of horseradish peroxidase-conjugated MEDI-524.

TABLE 23
Schedule of Evaluations

| | | | | | | | | All patients | |
|---|---|---|---|---|---|---|---|---|---|
| | DAYS | | | | | | Additional | 30 days | |
| Procedures and | All patients | | | | | | doses | after final | 90 days |
| Evaluations | 0 | 2 | 7 | 30 | 32 | 37 | 60/90/120 | dose | after final dose |
| Dosing | X | | | X | | | X^{a} | | |
| CBC w/ differential | X | | X | X | | X | X^{b} | X | |
| ALT, AST, BUN | X | | X | X | | X | X^{b} | X | |
| Creatine | | | | | | | | | |
| Serum MEDI-524 | X | X | | X | | X | X^{b} | X | X |
| MEDI-524 | X | | | X | | X | X^{b} | X | X |
| immunogenicity | | | | | | | | | |
| Safety assessments | X | X | X | X | X | X | X | X | |

^{a}Additional doses depended on when the child was enrolled in the RSV season
^{b}Performed on Study Day 60

[0571] Patient Population: A total of 217 children entered the study (N=6 at 3 mg/kg; N=211 at 15 mg/kg): the first 40 children were enrolled in the US in late winter of 2004; the remaining 177 children were enrolled in S. America, during the 2004 RSV season in the southern hemisphere. A total of 205 (94%) children completed the study through 90 days after the final dose of study drug. 112 (52%) children received 5 doses of study drug.

[0572] The mean age of participating children was 3.0 months (range: 0.1-21.2) and mean weight was 4.1 kg (range: 1.8-12.1). The majority of children were Hispanic (167, 77%), followed by white/non-Hispanic (41, 19%); 129 (59%) were male; 32 (15%) children had CLD of prematurity.

### Results

[0573] Overview: 217 children (40 USA, 177 S America) received 2-5 doses of MEDI-524; follow-up is ongoing. Data from 194 children: mean age, 3m (range: 1-21 m), mean GA, 33 wks (range: 25-35 wks), 62% male. AEs were typical of high risk children; 98% were mild/moderate severity. Potentially related AEs were transient injection site erythema (N=16), hypochromic anemia (N=2), SGOT increase (N=1). For all children, no related serious AEs or AE related dose discontinuations occurred. Mean trough serum drug levels 30 days after 1 and 2 doses of 15 mg/kg were 51 and 69 μg/mL, respectively, and only 1 child (of 185 tested) had evidence of immune reactivity (90 days after dose 3). This child remained clinically asymptomatic and target serum drug levels were maintained during dosing.

[0574] Safety—Adverse Events: Overall, 1006 AEs were reported in 200 children during this trial. Most were typical events characteristic of the underlying conditions of the participating children, and the incidence was generally similar to that previously reported in the Phase 3 placebo-controlled trial of palivizumab. No AEs resulted in discontinuation of study drug.

[0575] Nine AEs and 1 SAE (an inguinal hernia) were reported in the 6 children who received 3 mg/kg of study drug. None of the AEs that occurred in this low dose group were judged to be related to study drug. All AEs were Level 1 or 2 in severity.

[0576] Table 24 describes the AEs reported by Body System in this trial for children receiving 15 mg/kg. The AEs reported in the pivotal Phase 3 trial in premature infants and infants with CLD of prematurity who received palivizumab or placebo are included for comparison purposes (Pediatrics (1998) 102:531-537).

[0577] Ninety-three percent of children receiving repeated monthly doses of 15 mg/kg MEDI-524 reported at least one AE during the study. The majority of the AEs reported (945/997, 95%) were Level 1 or 2 in severity. The highest percentage of subjects had AEs referable to the following systems: Digestive (35%), Body as a Whole (46.6%), Hemic and Lymphatic (56%), and Respiratory (60%).

[0578] Digestive System: The commonly reported AEs were diarrhea (10.0%), AST increase (8.1%), infantile colic (7.1%), constipation (6.6%), gastroesophageal reflux disease (6.2%), ALT increase (6.2%), and vomiting (6.2%). All children with ALT (N=2), AST (N=7), ALT and AST elevations (N=11) were asymptomatic, with AEs detected during laboratory assessments. Two-thirds of these events were Level 1 or 2 severity. In most cases, the events were either transient and non-recurring with continued dosing or isolated elevations at the last study evaluation that resolved or improved within 1 month.

[0579] Body as a Whole: The commonly reported events were fever (16.1%), study drug injection site reactions (16.6%), and pain (11.8%). Only 2 cases of fever were associated temporally with study drug injection (occurring on the day of dose 4 and 1 day after dose 2, respectively, with no recurrences with subsequent dosing). The most common injection site reaction was erythema reported for 31 (14.7%) children. Injection site hemorrhage, pain, induration, and edema due to study drug were each reported for between 1 and 5 children. All injection site reactions were Level 1 in severity, transient, with most resolving within 1 day.

TABLE 24
Summary of Incidence of all Adverse Events by Body System

| | MI-CP104 | | MI-CP018 | | | |
|---|---|---|---|---|---|---|
| | MEDI-524 | | | | Palivizumab | |
| | 15 mg/kg | | 15 mg/kg | | Placebo | |
| Body System | (N = 211) | | (N = 1002) | | (N = 500) | |
| Total Number of AEs | 997 | | 5417 | | 2737 | |
| Total children | 196 | (92.9%) | 961 | (95.9%) | 482 | (96.4%) |
| reporting ≧1 AE | | | | | | |
| Body as a Whole | 98 | (46.4%) | 497 | (49.6%) | 247 | (49.4%) |
| Fever | 34 | (16.1%) | 272 | (27.1%) | 134 | (26.8%) |
| Site of Injection | 35 | (16.6%) | 27 | (2.7%) | 9 | (1.8%) |
| Reaction | | | | | | |
| Cardiovascular System | 11 | (5.2%) | 25 | (2.5%) | 19 | (3.8%) |
| Digestive System^{a} | 88 | (41.7%) | 456 | (45.5%) | 255 | (51.0%) |
| AST and/or ALT | 20 | (9.5%) | 75 | (6.9%) | 30 | (6.0%) |
| Increase | | | | | | |
| Endocrine System | 0 | | 1 | (0.1%) | 0 | |
| Hemic and Lymphatic | 117 | (55.5%) | 27 | (2.7%) | 15 | (3.0%) |
| System^{b} | | | | | | |
| Anemia^{c} | 107 | (50.7%) | NT | | NT | |
| Metabolic and | 10 | (4.7%) | 34 | (3.4%) | 16 | (3.2%) |
| Nutritional | | | | | | |
| Musculoskeletal | 1 | (0.5%) | 5 | (0.5%) | 3 | (0.6%) |
| Nervous System | 20 | (9.5%) | 134 | (13.4%) | 62 | (12.4%) |
| Respiratory System^{d} | 126 | (59.7%) | 835 | (83.3%) | 411 | (82.2%) |
| Skin and Appendages | 59 | (28.0%) | 326 | (32.5%) | 161 | (32.2%) |
| Special Senses | 35 | (16.6%) | 484 | (48.3%) | 233 | (46.6%) |
| Urogenital System | 3 | (1.4%) | 28 | (2.8%) | 17 | (3.4%) |

^{a}Both trials required routine liver function tests. More post dose time points were collected in the Phase ½ trial of MEDI-524 (5) compared to the Phase 3 palivizumab trial (1)
^{b}Study required CBC changes from baseline are included only in MEDI-524 group since CBCs were not collected in the Phase 3 palivizumab trial
^{c}Events coding to anemia, hemoglobin decreased, or neonatal anemia, NT = not tested per protocol
^{d}Includes respiratory infections in all groups

[0580] Respiratory System: The commonly reported AEs were nasopharyngitis (17.5%), upper respiratory tract infection (17.5%), bronchitis (16.1%), pharyngitis (7.6%), chronic bronchitis (7.1%), and wheezing (5.2%). Except for 2 cases of URI, no events were considered related to study drug; no wheezing events occurred within 2 days of study drug injection.

[0581] Hemic and Lymphatic System: The most commonly reported AE was anemia and other analogous events (50.7%). All but one event (final Hgb 8.6 g/dL) were Level 1 or 2 in severity; 101 (90%) of the children received iron supplementation. For most children (99, 88%), low hemoglobin levels resolved or improved by the last laboratory evaluation, and were consistent with anemia of prematurity.

[0582] AEs Judged to be Possibly Related: A total of 47 (22%) children experienced at least one AE considered potentially related to study drug. The majority (109/117, 93.2%) of related AEs were Level 1 or 2 in severity. The most common (>1%) were injection site reactions (30, 14.2%) and transaminase elevations (14, 6.6%).

[0583] Safety—Serious Adverse Events: Table 25 describes the SAEs reported by Body System in this trial for children receiving 15 mg/kg. The SAEs reported in the pivotal Phase 3 trial in premature infants and infants with CLD of prematurity who received palivizumab or placebo are included for comparison purposes. Twenty-two (10.4%) children in the 15 mg/kg dosage group experienced 26 SAES; most were respiratory hospitalizations (20, 77%). No SAEs resulted in permanent discontinuation of study drug. The rates of all SAEs by Body System seen in this trial appeared similar to or lower than those reported for palivizumab or placebo in the previous pivotal Phase 3 trial.

TABLE 25
Summary of Incidence of all Serious Adverse Events by Body System

| | MI-CP104 | | MI-CP018 | | | |
|---|---|---|---|---|---|---|
| | MEDI-524 | | | | Palivizumab | |
| | 15 mg/kg | | 15 mg/kg | | Placebo | |
| Body System | (N = 211) | | (N = 1002) | | (N = 500) | |
| Total Number of SAEs | 26 | | 475 | | 277 | |
| Total children reporting | 22 | (10.4%) | 298 | (29.7%) | 170 | (34.0%) |
| ≧1 SAE | | | | | | |
| Body as a Whole | 2 | (0.9%) | 101 | (10.1%) | 53 | (10.6%) |
| Cardiovascular System | 0 | | 3 | (0.3%) | 2 | (0.4%) |
| Digestive System | 1 | (0.5%) | 93 | (9.3%) | 42 | (8.4%) |
| Hemic and Lymphatic | 1 | (0.5%) | 2 | (0.2%) | 1 | (0.2%) |
| System | | | | | | |
| Metabolic and | 0 | | 5 | (0.5%) | 3 | (0.6%) |
| Nutritional | | | | | | |
| Musculoskeletal | 0 | | 1 | (0.1%) | 2 | (0.4%) |
| Nervous System | 0 | | 4 | (0.4%) | 2 | (0.4%) |
| Respiratory System | 18 | (8.5%) | 144 | (14.4%) | 82 | (16.4%) |
| Skin and Appendages | 0 | | 0 | | 2 | (0.4%) |
| Special Senses | 0 | | 25 | (2.5%) | 26 | (5.2%) |
| Urogenital System | 2 | (0.9%) | 4 | (0.4%) | 5 | (1.0%) |

[0584] One SAE was considered possibly related to study drug. This child, given a diagnosis of idiopathic thrombocytopenic purpura (ITP), had a transient significant decrease in platelets following dose 4 of study drug that resolved without treatment. No other child in this study had any platelet abnormalities noted during the trial.

[0585] Two children died during the study. Both deaths were judged to be unrelated to study drug. One was due to a RSV bronchopneumonia, in a child hospitalized 7 days after first dose. The other event was judged as SIDS by autopsy and occurred more than 2 months after the last dose of study drug (in the 3 mg/kg dose group).

[0586] Immunogenicity: No anti-MEDI-524 binding responses (defined as a titer≧1:10) were detected in any child during the MEDI-524 dosing period. 7 (3.3%) children in the 15 mg/kg treatment group had anti-MEDI-524 reactivity detected after their last dose of MEDI-524: 3 (1.4%) at 30 days after dose 5, and 4 (1.9%) at 90 days after the final dose (1 each after 3 or 4 doses, and 2 after 5 doses. Immune reactivity at 30 days after dose 5 was associated with no detectable drug levels at this time point. These responses occurred in the absence of any significant adverse events during the study. The one child with ITP had anti-MEDI-524 binding activity detected 2 months after the event (90 days after the dose 4).

[0587] Pharmacokinetics: Mean serum MEDI-524 trough concentrations during monthly IM injections of 15 mg/kg are presented in FIG. 15. Concentrations≧30 μg/mL were maintained throughout dosing in ≧90% of children and increased with continued dosing as expected. As shown in Table 26, a vast majority (>90%) of high risk children achieve target serum trough concentrations of ≧30 μg/ml throughout dosing.

TABLE 26
Serum Trough Concentrations of MEDI-524

| % of Patients with Monthly Serum | Day | Day | Day | Day | Day |
|---|---|---|---|---|---|
| Trough Concentrations of ≧30 μg/ml | 30 | 60 | 90 | 120 | 150 |
| MEDI-524 | 90% | 96% | 93% | 94% | 94% |

### Discussion

[0588] Conclusions: MEDI-524 given for up to 5 doses at 3 and 15 mg/kg to high-risk children appeared to be safe and well tolerated. Adverse events were typically Level 1 or 2 in severity, were consistent with the underlying conditions in this high-risk population, and were similar in incidence to that observed in previous trials of palivizumab. Transient Level 1 site of injection reactions were reported in 16.6%.

[0589] The incidence of immune reactivity was low (N=7, 3%) and was detected after completion of dosing (post dose 5 or 90 days after final dose). Immune reactivity detected after dose 5 (N=3) was associated with no detectable serum drug levels and no significant adverse events. The one child with ITP had anti-MEDI-524 binding activity detected 2 months after this event (90 days after the dose 4).

[0590] The pharmacokinetic profile was consistent with IgG₁. Ninety percent or more of children achieving target serum trough concentrations≧30 μg/mL throughout dosing, with concentrations rising with each subsequent dose. In the previous successful pivotal Phase 3 trial of similarly dosed children given palivizumab, 79% and 87% achieved these levels after doses 2 and 4, respectively.

[0591] These data suggest that MEDI-524 given as repeat IM monthly 15 mg/kg doses in high risk children has a safety, immunogenicity, and PK profile similar to palivizumab. These data support continued evaluation of MEDI-524 for the prevention of RSV hospitalizations in high risk children, and support the evaluation of MEDI-524 for the prevention of RSV hospitalizations in these high-risk children.

### 6.14 Phase 1 Single Dosing MEDI-524 Clinical Trial Safety Study in Children with RSV Infection

[0592] Objective: This was single dose study of MEDI-524 to evaluate its safety, immunogenicity, and pharmacokinetics (PK) in children with RSV lower respiratory infection (LRI). This study was the second trial of MEDI-524 conducted in a pediatric population. It was designed to describe the safety, tolerability, immunogenicity, and pharmacokinetics of a single intravenous (IV) dose of MEDI-524 in patients that were hospitalized with RSV LRI. Further, as part of this Phase 1 safety study we assessed whether MEDI-524 would hasten the clearance of a naturally acquired RSV infection in children.

[0593] Design/Methods: Thirty children hospitalized with RSV LRI (bronchiolitis) were randomly divided into four treatment groups, and received intravenous administration of either placebo (n=1 5) or 3 mg/kg, 15 mg/kg, or 30 mg/kg of MEDI-524 (n=5/group). Clincal/lab adverse events (AEs), immunogenicity, and PK were evaluated. RSV was investigated by viral culture (PFU/mL), antigen detection (Binax) and quantitative RT-PCR, in nasal washes obtained before, and 1, 2, and 7 days after administration of placebo or MEDI-524.

### Results

[0594] Adverse effects of serious adverse effect were balanced between treatment groups and placebo group. Two patients reported a serious adverse effect, which was determined to be unrelated to the MEDI-524 administration, one of which was in the placebo group (EBV infection and respiratory failure) and one in the 30 mg/kg group (respiratory failure). There were no discernable differences in duration of hospitalization, use of supplemental oxygen, ICU needed or the need for mechanical ventilation

[0595] Serum and nasal titers of MEDI-524: MEDI-524 presence in serum and nasal secretions is presented in Table 28. As expected, the mean serum and nasal concentrations of MEDI-524 increase with increasing dosages.

TABLE 28
MEDI-524 Present in Serum and Nasal Secretions in Children with RSV

Day 1 Nasal MEDI-524

| | Day 2 serum mean | Mean | |
|---|---|---|---|
| | MEDI-524 (μg/ml) | (μg/ml) | % Positive |
| Placebo | 0 | 0 | 0 |
| 3 mg/kg | 61.8 | 0.2 | 40 |
| 15 mg/kg | 170.8 | 0.9 | 60 |
| 30 mg/kg | 333.2 | 1.3 | 80 |

[0596] Pharmokinetics: The PK profile of MEDI-524 in nasal secretions following a single IV dose of MEDI-524 is shown in FIG. 16. The percent of subjects with MEDI-524 in nasal washes was directly proportional to the amount of MEDI-524 received. Patients receiving a 3 mg/kg dose had MEDI-524 present in nasal secretions at 2 days post-dose, whereas patients receiving 15 mg/kg or 30 mg/kg had MEDI-524 present in nasal washes for up to 30 days post-dose.

[0597] RSV viral titers: RSV viral titers were also assessed in the nasal secretions of children in the various groups at days 0, 1 and 2 post-dose (FIG. 17). Participants who received MEDI-524 (groups pooled) experienced a significant decrease in mean log₁₀ PFU/mL between Study Day 0 and 1 compared to placebo recipients (Mean=−2.6, SD=1.6, vs. −0.9, SD=1.7; p<0.05). In addition, more MEDI-524 than placebo-treated children were antigen negative by Study Day 1 (13/15 vs. 5/15, respectively) (data not shown). The recovery of viral RNA by RT-PCR on Study day 7 was also lower in MEDI-524 than in placebo-treated children (57% vs. 93%) (data not shown). When the nasal secretions were subjected to tissue culture, there was a statistically significant decrease in RSV in nasal secretions recovered from tissue culture in MEDI-524 as compared to placebo-treated patients (FIG. 18). These data indicate that administration of MEDI-524 has an impact on upper respiratory tract infections.

### Results

[0598] Conclusion: These data suggest that MEDI-524 given as a single IV 3 mg/kg, 15 mg/kg or 30 mg/kg dose in children hospitalized with RSV infection has a safety, immunogenicity, and PK profile similar to placebo. Additionally, these findings indicate that a single dose of MEDI-524 can reduce RSV levels in the upper airway. Improved clearance of RSV from the upper airway may have added benefits compared to current immunoprophylaxis, including increased efficacy in preventing lower respiratory tract disease, as well the prevention of other diseases or symptoms in which viruses play a role such as otitis media, asthma, wheezing, etc. These data support continued evaluation of MEDI-524 in children hospitalized with RSV LRI and/or URI, and support the evaluation of MEDI-524 for the decrease in the length of hospitalizations in these children.

### 6.15 Phase 3 Clinical Trial of MEDI-524 in High-Risk Children with Prematurity, Chronic Lung Disease of Prematurity, or Chronic Heart Disease

[0599] These studies will be conducted similar to those described above in Examples 6.13 and 6.14. Groups of children with prematurity or chronic lung disease of prematurity will be randomized into groups that receive palivizumab or MEDI-524 by single IM dose of 15 mg/kg on day 0 and then in 30 day intervals for months 1, 2, 3, and 4 (i.e., 5 doses total, each separated by 30 day intervals). Each group will be assessed for efficacy and safety throughout the dosage period and for 30 days following the last dose. Primary endpoint will be RSV hospitalization. Secondary endpoints include incidence of lower respiratory tract infection, RSV infection, RSV titers, and incidence and frequency of otitis media.

[0600] A follow-up, supportive study will also be conducted in children with complicated chronic heart disease (CHD), similar to those studies outlined above.

### 6.16 Prophylaxis of Otitis Media by A4B4L1FR-S28R (MEDI-524)

[0601] Given the potency of A4B4L1FR-S28R (MEDI-524) at lower doses than palivizumab in preventing upper respiratory infections, similar dosing studies may be performed to determine the efficacy of MEDI-524 and palivizumab in preventing or treating otitis media in humans. Dosing studies may be performed with children at the age of 1 yr as well as with adults at risk for developing otitis media (e.g., adults that are immunocompromised or immunosuppressed). A range of doses (e.g., 2 mg/kg to 60 mg/kg as well as the frequency of doses to be administered may be tested to determine the efficacy of MEDI-524 and palivizumab in preventing or treating otitis media in the experimental groups as compared to a control group (e.g., human infants and adults who are determined to not have otitis media or who are determined to not be at risk for developing otitis media). The antibodies may be administered by any method known in the art, for example, by i.m. injection or intravenously (i.v.). It is anticipated that MEDI-524, at significantly lower doses than palivizumab, will be effective in preventing and/or treating otitis media in the experimental groups (e.g., human infants within the first year of life and in adults who are at risk for developing otitis media) as compared to control groups (e.g., human infants and adults who are determined to not have otitis media or who are determined to not be at risk for developing otitis media).

### 6.17 Production, Isolation, and Characterization of Modified Hinge-Fc Fragments

[0602] This example illustrate the production, isolation, and characterization of modified hinge-Fc fragments that have longer in vivo half-lives.

### 6.17.1 Library Construction

### 6.17.1.1 Reagents

[0603] All chemicals were of analytical grade. Restriction enzymes and DNA-modifying enzymes were purchased from New England Biolabs, Inc. (Beverly, Mass.). Oligonucleotides were synthesized by MWG Biotech, Inc. (High Point, N.C.). pCANTAB5E phagemid vector, anti-E-tag-horseradish peroxydase conjugate, TG1 E. Coli strain, IgG Sepharose 6 Fast Flow and HiTrap protein A columns were purchased from APBiotech, Inc. (Piscataway, N.J.). VCSM13 helper phage and the Quick change mutagenesis kit were obtained from Stratagene (La Jolla, Calif.). CJ236 E. coli strain was purchased from Bio-Rad (Richmond, Calif.). BCA Protein Assay Reagent Kit was obtained from Pierce (Rockford, Ill.). Lipofectamine 2000 was purchased from Invitrogen, Inc. (Carlsbad, Calif.).

### 6.17.1.2 Expression and Purification of Murine and Human FcRn

[0604] The amino acid sequences of human and mouse FcRn are SEQ ID NOS: 84 and 85, respectively (see also Firan et al., Intern. Immunol., 13:993-1002, 2001 and Popov et al., Mol. Immunol., 33:521-530, 1996, both of which are incorporated herein by reference in their entireties). Human FcRn was also obtained following isolation from human placenta cDNA (Clontech, Palo Alto, Calif.) of the genes for human β2-microglobulin (Kabat et al., 1991, Sequences of Proteins of Immunological Interest, U.S. Public Health Service, National Institutes of Health, Washington, DC) and codons −23 to 267 of the human a chain (Story et al., J. Exp. Med., 180:2377-2381, 1994) using standard PCR protocols. Light and heavy chains along with their native signal sequence (Kabat et al., 1991, supra; Story et al., supra) were cloned in pFastBac DUAL and pFastBac1 bacmids, respectively, and viral stocks produced in Spodoptera frugiperda cells (Sf9) according to the manufacturer's instructions (Invitrogen, Carlsbad, Calif.). High-Five cells were infected at a multiplicity of infection of 3 with the baculoviruses encoding α and β2 chains using commercially available protocols (Invitrogen). Recombinant human FcRn was purified as follows: supernatant of infected insect cells was dialyzed into 50 mM MES (2-N-[Morpholino]ethansulfonic acid) pH 6.0 and applied to a 10 ml human IgG Sepharose 6 Fast Flow column (APBiotech, Piscataway, N.J.). Resin was washed with 200 ml 50 mM MES pH 6.0 and FcRn eluted with 0.1 M Tris-Cl pH 8.0. Purified FcRn was dialyzed against 50 mM MES pH 6.0, flash frozen and stored at −70° C. The purity of proteins was checked by SDS-PAGE and HPLC.

### 6.17.1.3 Preparation of TAA-Containing ssDNA Uracil Template

[0605] Construction of the libraries was based on a site directed mutagenesis strategy derived from the Kunkel method (Kunkel et al., Methods Enzymol. 154:367-382, 1987). A human hinge-Fc gene spanning amino acid residues 226-478 (Kabat et al. (1991) Sequences of proteins of immunological interest. (U.S. Department of Health and Human Services, Washington, D.C.) 5^{th} ed.) derived from MEDI-493 human IgG1 (Johnson et al., J. Infect. Disease, 176:1215-1224, 1997), was cloned into the pCANTAB5E phagemid vector as an SfiI/NotI fragment. Four libraries were generated by introducing random mutations at positions 251, 252, 254, 255, 256 (library 1), 308, 309, 311, 312, 314 (library 2), 385, 386, 387, 389 (library 3) and 428, 433, 434, 436 (library 4). Briefly, four distinct hinge-Fc templates were generated using PCR by overlap extension (Ho et al., Gene, 15:51 -59, 1989), each containing one TAA stop codon at position 252 (library 1), 310 (library 2), 384 (library 3) or 429 (library 4), so that only mutagenized phagemids will give rise to Fc-displaying phage.

[0606] Each TAA-containing single-stranded DNA (TAAssDNA) was then prepared as follows: a single CJ236 E. coli colony harboring one of the four relevant TAA-containing phagemids was grown in 10 ml 2×YT medium supplemented with 10 μg/ml chloramphenicol and 100 μg/ml ampicillin. At OD₆₀₀=1, VCSM13 helper phage was added to a final concentration of 10¹⁰ pfu/ml. After 2 hours, the culture was transferred to 500 ml of 2×YT medium supplemented with 0.25 μg/ml uridine, 10 μg/ml chloramphenicol, 30 μg/ml kanamycin, 100 μg/ml ampicillin and grown overnight at 37° C. Phage were precipitated with PEG6000 using standard protocols (Sambrook et al., 1989, Molecular Cloning: A Laboratory Manual, Cold Spring Harbor Press, Cold Spring Harbor, N.Y., Vols. 1-3) and purified using the QIAPREP Spin M13 Kit (Qiagen, Valencia, Calif.) according to the manufacturer's instructions. 10 to 30 μg of each uracil-containing TAAssDNA template was then combined with 0.6 μg of the following phosphorylated oligonucleotides (randomized regions underlined) in 50 mM Tris-HCl, 10 mM MgCl₂, pH 7.5 in a final volume of 250 μl:

[0607] Library 1:

(SEQ ID NO:378)

5′-CATGTGACCTCAGGSNNSNNSNNGATSNNSNNGGTGTCCTTGGGTTTT
GGGGGG-3′

[0608] Library 2:

(SEQ ID NO:379)

5′-GCACTTGTACTCCTTGCCATTSNNCCASNNSNNGTGSNNSNNGGTGA
GGACGC-3′

[0609] Library 3:

(SEQ ID NO:380)

5′-GGTCTTGTAGTTSNNCTCSNNSNNSNNATTGCTCTCCC-3′

[0610] Library 4:

(SEQ ID NO:381)

5′-GGCTCTTCTGCGTSNNGTGSNNSNNCAGAGCCTCATGSNNCACGGA
GCATGAG-3′

where N=A, C, T or G and S=G or C.

### 6.17.1.4 Synthesis of Heteroduplex DNA

[0611] Appropriate, degenerate oligonucleotides were phosphorylated in the presence of T4 polynucleotide kinase using the standard protocol. Ten to 30 μg of ssDNA U template and 0.6 μg of phosphorylated oligonucleotide were combined in 50 mM Tris-HCl containing 10 mM MgCl₂, pH 7.5, to a final volume of 250 μl and incubated at 90° C. for 2 minutes, 50° C. for 3 minutes, and 20° C. for 5 minutes. Synthesis of the heteroduplex DNA was carried out by adding 30 units of both T4 DNA ligase and T7 DNA polymerase in the presence of 0.4 mM ATP, 1 mM dNTPs and 6 mM DTT and the mixture was incubated for 4 hours at 20° C. The heteroduplex DNA thus produced was then purified and desalted using Qiagen QIAQUICK® DNA purification Kit (Qiagen, Calif.).

### 6.17.1.5 Electroporation

[0612] Three hundred microliters of electrocompetent TG1 E. coli cells were electroporated with 1 to 5 μg of the heteroduplex DNA in a 2.5 kV field using 200Ω and 25 μF capacitance until a library size of 1×10⁸ (library 1 and 2) or 1×107 (library 3 and 4) was reached. The cells were resuspended in 2 ml SOC medium and the procedure was repeated 6 to 10 times. The diversity was assessed by titration of recombinant E. coli. The pulsed cells were incubated in 50 ml SOC medium for 30 minutes at 37° C. under agitation, centrifuged, and resuspended in 500 ml 2×YT containing 100 μg/ml ampicillin and 10¹⁰ pfu/ml of VCSM13 helper phage. The culture was incubated overnight at 37° C. and the cells were pelleted by centrifugation. The phage in the supernatant which express mutated hinge-Fc portion on its GIII-coat protein were precipitated with PEG6000 as previously described (Sambrook et al., 1989, supra) and resuspended in 5 ml of 20 mM MES, pH 6.0.

### 6.17.2 Panning of the Library

[0613] Phage were panned using an ELISA-based approach. A 96-well ELISA plate was coated with 100 μl/well of 0.01 mg/ml murine FcRn in sodium carbonate buffer, pH 9.0, at 4° C. overnight and then blocked with 4% skimmed milk at 37° C. for 2 hours. In each well of the coated plate, 100-150 μl of the phage suspension (about 10¹³ phage in total) in 20 mM MES, pH 6.0, containing 5% milk and 0.05% Tween 20, were placed and incubated at 37° C. for two to three hours with agitation.

[0614] After the incubation, the wells were washed with 20 mM MES, pH 6.0, containing 0.2% Tween 20 and 0.3 M NaCl about thirty times at room temperature. The bound phage were eluted with 100 μl/well of PBS, pH 7.4, at 37° C. for 30 minutes.

[0615] The eluted phage were then added to the culture of exponentially growing E. coli cells and propagation was carried out overnight at 37° C. in 250 ml 2×YT supplemented with 100 μg/ml ampicillin and 10¹⁰ pfu/ml of VCSM13 helper phage. Propagated phage were collected by centrifugation followed by precipitation with PEG and the panning process was repeated up to a total of six times.

[0616] For the phage library containing mutations in residues 308-314 (H310 and W313 fixed), the phage expressing hinge-Fc region with higher affinities for FcRn were enriched by each panning process as shown in Table 29. The panning results of the library for the mutations in the residues 251-256 (I253 fixed) and that of the library for the mutations in the residues 428-436 (H429, E430, A43 1, L432, and H435 fixed), are shown in Tables 30 and 31, respectively. Furthermore, the panning results of the library for the mutations in the residues 385-389 (E388 fixed) is shown in Table 32.

TABLE 29
PANNING OF LIBRARY (RESIDUES 308-314; H310 AND
W313 FIXED)
pCANTAB5E-KUNKEL-muFcRn (MURINE FcRn)

| | |
|---|---|
| OUTPUT | ENRICHMENT |

| PANNING | +FcRn | −FcRn | RATIO |
|---|---|---|---|
| 1st Round | 1.1 × 10⁵ | 0.5 × 10⁵ | 2 |
| 2nd Round | 1 × 10⁴ | 0.2 × 10⁴ | 5 |
| 3rd Round | 9 × 10⁴ | 0.3 × 10⁴ | 30 |
| 4th Round | 3 × 10⁵ | 2 × 10⁴ | 15 |

[0617] TABLE 30
PANNING OF LIBRARY (RESIDUES 251-256; I253 FIXED)
pCANTAB5E-KUNKEL-muFcRn

| | |
|---|---|
| OUTPUT | ENRICHMENT |

| PANNING | +FcRn | −FcRn | RATIO |
|---|---|---|---|
| 1st Round | 2.5 × 10⁵ | 1 × 10⁵ | 2.5 |
| 2nd Round | 6 × 10⁴ | 2 × 10⁴ | 3.0 |
| 3rd Round | 8 × 10⁵ | 4 × 10⁴ | 20 |
| 4th Round | 1.2 × 10⁶ | 5 × 10⁴ | 24 |
| 5th Round | 3.0 × 10⁶ | 6 × 10⁴ | 50 |

[0618] TABLE 31
PANNING OF LIBRARY (RESIDUES 428-436;
H429, E430, A431, L432, AND H435 FIXED)
pCANTAB5E-KUNKEL-muFcRn

| | |
|---|---|
| OUTPUT | ENRICHMENT |

| PANNING | +FcRn | −FcRn | RATIO |
|---|---|---|---|
| 1st Round | 2.3 × 10⁵ | 0.9 × 10⁵ | 2.5 |
| 2nd Round | 3 × 10⁴ | 1 × 10⁴ | 3 |
| 3rd Round | 2 × 10⁵ | 2 × 10⁴ | 10 |
| 4th Round | 8 × 10⁵ | 5 × 10⁴ | 16 |

[0619] TABLE 32
PANNING OF LIBRARY (RESIDUES 385-389; E388 FIXED)
pCANTAB5E-KUNKEL-muFcRn

| | |
|---|---|
| OUTPUT | ENRICHMENT |

| PANNING | +FcRn | −FcRn | RATIO |
|---|---|---|---|
| 1st Round | 4.2 × 10⁵ | 3.8 × 10⁵ | 1.1 |
| 2nd Round | 5 × 10⁴ | 0.3 × 10⁴ | 17 |
| 3rd Round | 3.5 × 10⁵ | 1 × 10⁴ | 35 |
| 4th Round | 5.5 × 10⁵ | 4 × 10⁴ | 14 |
| 5th Round | 7.5 × 10⁵ | 5 × 10⁴ | 15 |
| 6th Round | 2 × 10⁶ | 1 × 10⁵ | 20 |

### 6.17.3 Identification of Isolated Clones from Panning

[0620] After each panning process, phage were isolated and the nucleic acids encoding the expressed peptides which bound to FcRn were sequenced by a standard sequencing method such as by dideoxynucleotide sequencing (Sanger et al., Proc. Natl. Acad. Sci USA, 74:5463-5467, 1977) using a ABI3000 genomic analyzer (Applied Biosystems, Foster City, Calif.).

[0621] As a result of panning, two mutants were isolated from the phage library containing mutations in residues 308-314 (H310 and W313 fixed), thirteen mutants from the library for residues 251-256 (I253 fixed), six mutants from the library for residues 428-436 (H429, E430, A43 1, L432, and H435 fixed), and nine mutants from the library for residues 385-389 (E388 fixed). The mutants isolated from the libraries are listed in Table 33.

TABLE 33
MUTANTS ISOLATED BY PANNING

| LIBRARY | MUTANTS* |
|---|---|
| 251-256 | Leu Tyr Ile Thr Arg Glu (SEQ ID NO: 348) |
| | [symbol] |
| | [symbol] |
| | [symbol] |
| | [symbol] |
| | [symbol] |
| | Leu Tyr Ile Ser Leu Gln (SEQ ID NO: 354) |
| | Leu Phe Ile Ser Arg Asp (SEQ ID NO: 355) |
| | Leu Phe Ile Ser Arg Thr (SEQ ID NO: 356) |
| | Leu Phe Ile Ser Arg Arg (SEQ ID NO: 357) |
| | Leu Phe Ile Thr Gly Ala (SEQ ID NO: 358) |
| | Leu Ser Ile Ser Arg Glu (SEQ ID NO: 359) |
| | Arg Thr Ile Ser Ile Ser (SEQ ID NO: 360) |
| 308-314 | Thr Pro His Ser Asp Trp Leu (SEQ ID NO: 361) |
| | Ile Pro His Glu Asp Trp Leu (SEQ ID NO: 362) |
| 385-389 | Arg Thr Arg Glu Pro (SEQ ID NO: 363) |
| | [symbol] |
| | Ser Asp Pro Glu Pro (SEQ ID NO: 365) |
| | Thr Ser His Glu Asn (SEQ ID NO: 366) |
| | Ser Lys Ser Glu Asn (SEQ ID NO: 367) |
| | His Arg Ser Glu Asn (SEQ ID NO: 368) |
| | Lys Ile Arg Glu Asn (SEQ ID NO: 369) |
| | Gly Ile Thr Glu Ser (SEQ ID NO: 370) |
| | Ser Met Ala Glu Pro (SEQ ID NO: 371) |
| 428-436 | [symbol] |
| | Met His Glu Ala Leu His Phe His His (SEQ ID NO: 373) |
| | Met His Glu Ala Leu Lys Phe His His (SEQ ID NO: 374) |
| | Met His Glu Ala Leu Ser Tyr His Arg (SEQ ID NO: 375) |
| | Thr His Glu Ala Leu His Tyr His Thr (SEQ ID NO: 376) |
| | Met His Glu Ala Leu His Tyr His Tyr (SEQ ID NO: 377) |

*Substituting residues are indicated in bold face

[0622] The underlined sequences in Table 33 correspond to sequences that occurred 10 to 20 times in the final round of panning and the sequences in italics correspond to sequences that occurred 2 to 5 times in the final round of panning. Those sequences that are neither underlined nor italicized occurred once in the final round of panning.

### 6.17.4 Expression and Purification of Soluble Mutant Hinge-FC Region

[0623] The genes encoding mutated hinge-Fc fragments are excised with appropriate restriction enzymes and recloned into an expression vector, for example, VβpelBhis (Ward, J. Mol. Biol., 224:885-890, 1992). Vectors containing any other type of tag sequence, such as c-myc tag, decapeptide tag (Huse et al., Science, 246:1275-1281, 1989), FLAG™ (Immunex) tags, can be used. Recombinant clones, such as E. coli, are grown and induced to express soluble hinge-Fc fragments, which can be isolated from the culture media or cell lysate after osmotic shock, based on the tag used, or by any other purification methods well known to those skilled in the art and characterized by the methods as listed below.

### 6.17.5 Construction, Production and Purification of IgG1 Variants

[0624] Representative Fc mutations such as I253A, M252Y/S254T/T256E, M252W, M252Y, M252Y/T256Q, M252F/T256D, V308T/L309P/Q311S, G385D/Q386P/N389S, G385R/Q386T/P387R/N389P, H433K/N434F/Y436H, and N434F/Y436 were incorporated into the human IgG1 MEDI-493 (palivizumab) (Johnson et al., 1997, supra). The heavy chain was subjected to site-directed mutagenesis using a Quick Change Mutagenesis kit (Stratagene, La Jolla, Calif.) according to the manufacturer's instructions and sequences were verified by didoxynucleotide sequencing using a ABI3000 (Applied Biosystems, Foster City, Calif.) sequencer. The different constructions were expressed transiently in human embryonic kidney 293 cells using a CMV immediate-early promoter and dicistronic operon in which IgG1/V_{H} is cosecreted with IgG1/V_{L} (Johnson et al., 1997, supra). Transfection was carried out using Lipofectamine 2000 (Invitrogen, Carlsbad, Calif.) and standard protocols. IgGs were purified from the conditioned media directly on 1 ml HiTrap protein A columns according to the manufacturer's instructions (APBiotech).

### 6.17.6 Characterization of Mutated Hinge-FC Region

### 6.17.6.1 In Vitro Characterization HPLC and SDS-PAGE

[0625] Following the purification, general characteristics such as molecular weight and bonding characteristics of the modified hinge-Fc fragments may be studied by various methods well known to those skilled in the art, including SDS-PAGE and HPLC.

FcRn Binding Assay

[0626] Binding activity of modified hinge-Fc fragments can be measured by incubating radio-labeled wild-type hinge-Fc or modified hinge-Fc with the cells expressing either mouse or human FcRn. Typically, endothelial cell lines such as SV40 transformed endothelial cells (SVEC) (Kim et al., J. Immunol., 40:457-465, 1994) are used. After incubation with the hinge-Fc fragments at 37° C. for 16-18 hours, the cells are washed with medium and then detached by incubation with 5 mM Na₂EDTA in 50 mM phosphate buffer, pH 7.5, for 5 minutes. The radioactivity per 10⁷ cells is measured.

[0627] Then, the cells are resuspended in 2 ml of 2.5 mg/ml CHAPS, 0.1 M Tris-HCl pH 8.0 containing 0.3 mg/ml PMSF, 25 mg/ml pepstatin and 0.1 mg/ml aprotinin and incubated for 30 minutes at room temperature. The cell suspension is then centrifuged and the supernatant separated. The radioactivity of the supernatant is measured and used to calculate the amount of the hinge-Fc fragments extracted per 10⁷ cells.

[0628] The K_{d} for the interaction of wild type human IgG1 with murine and human FcRn (269 and 2527 nM, respectively) agree well with the values determined by others (265 and 2350 nM, respectively, Firan et al., 2001, supra). The I253A mutation virtually abolishes binding to human and murine FcRn, as reported by others (Kim et al., Eur. J. Immunol., 29:2819-2825, 1991; Shields et al., J. Biol. Chem., 276:6591-6604, 2001). This is not the result of misfolding of the antibody as this mutant retains the same specific activity than the wild type molecule (palivizumab) in a microneutralization assay (Johnson et al., 1997, supra; data not shown).

[0629] Human IgG1 mutants with increased binding affinity towards both murine and human FcRn were generated (Table 33). Improvements in complex stability were overall less marked for the human IgG1-human FcRn pair than for the human IgG1-murine FcRn compared to wild type IgG1 were 30-(ΔΔG=2.0 kcal/mol for N434F/Y436H) and 11 -(ΔΔG=1.4 kcal/mol for M252Y/S254Y/S254T/T256E) fold, respectively. However, ranking of the most critical positions remain unchanged when comparing human and murine FcRn: the largest increases in IgG1-murine FcRn complex stability (ΔΔG>1.3 kcal/mol) occurred on mutations at positions 252, 254, 256 (M252Y/S254T/T256E and M252W) and 433, 434, 436 (H433K/N434F/Y436H and N434F/Y436H). Likewise, the same mutations were found to have the most profound impact on the IgG1-human FcRn interaction and also resulted in the largest increases in complex stability (ΔΔG>1.0 kcal/mol). Substitutions at positions 308, 309, 311, 385, 386, 387 and 389 had little or no effect on the stability of the complexes involving human or murine FcRn (ΔΔG<0.5 kcal/mol). Residues at the center of the Fc-FcRn combining site contribute significantly more to improvement in complex stability than residues at the periphery (FIG. 27).

[0630] Efficient binding of human Fc to murine FcRn apparently requires the presence of several wild type Fc residues. For example, leucine is very conserved at 251, arginine at 255, aspartic acid at 310, leucine at 314 and methionine at 428 (FIG. 24). Another specificity trend is observed when one considers positions 308, 309, and 311 where threonine, proline, and serine, respectively, are very strongly favored over the corresponding wild type residues (FIG. 24). However, generation of this strong consensus sequences does not correlate with the magnitude of increase in affinity as V308T/L309P/Q311 S binds less than 2-fold better than the wild type IgG1 to both human and murine FcRn (Table 34).

[0631] Increases in affinity can be strongly dependent upon residue substitution at one ‘hot spot’ position. For example, the single mutation M252Y causes an increase in binding to murine FcRn by 9-fold, whereas additional mutations bring little (M252Y/S254T/T256E) or no (M252Y/T256Q) added benefit. The same trend is observed for the human receptor, although to a lesser extent. Indeed, M252Y/S254T/T256E shows a marked improvement of 2.5-fold in affinity compared to M252Y. This probably reflects the differences between the binding site of human and murine FcRn (West and Bjorkman, Biochemistry, 39:9698-9708, 2000).

[0632] Phage-derived IgG1 mutants exhibiting a significant increase in affinity towards murine FcRn (ΔΔG>1.3 kcal/mol) also showed significant binding activity to the receptor at pH 7.2 when compared to wild type IgG1 (FIGS. 26A-26H). IgG1 mutants with moderate increase in affinity (ΔΔG<0.3 kcal/mol) bound very poorly at pH 7.2 (data not shown). In contrast, IgG1 mutants with large (ΔΔG>1.0 kcal/mol) increase in affinity towards human FcRn exhibited only minimal binding at pH 7.4 when compared to wild type IgG1 (FIGS. 26A-26H).

TABLE 34
DISSOCIATION CONSTANTS AND RELATIVE FREE ENERGY
CHANGES FOR THE BINDING OF IgG1/FC MUTANTS TO
MURINE AND HUMAN FcRn*

| | Dissociation | | Dissociation | |
|---|---|---|---|---|
| | Constant | ΔΔG | Constant | ΔΔG |
| | Fc/Murine | (kcal/ | Fc/Human | (kcal/ |
| MUTANT | FcRn (nM) | mol) | FcRn (mM) | mol) |
| wild type | 269 ± 1 | | 2527 ± 117 | |
| I253A | NB | NA | NB | NA |
| M252Y/S254T/T256E | 27 ± 6 | 1.4 | 225 ± 10 | 1.4 |
| M252W | 30 ± 1 | 1.3 | 408 ± 24 | 1.1 |
| M252Y | 41 ± 7 | 1.1 | 532 ± 37 | 0.9 |
| M252Y/T256Q | 39 ± 8 | 1.1 | 560 ± 102 | 0.9 |
| M252F/T256D | 52 ± 9 | 1.0 | 933 ± 170 | 0.6 |
| V308T/L309P/Q311S | 153 ± 23 | 0.3 | 1964 ± 84 | 0.1 |
| G385D/Q386P/N389S | 187 ± 10 | 0.2 | 2164 ± 331 | 0.1 |
| G385R/Q386T/P387R/N389P | 147 ± 24 | 0.4 | 1620 ± 61 | 0.3 |
| H433K/N434F/Y436H | 14 ± 2 | 1.8 | 399 ± 47 | 1.1 |
| N434F/Y436H | 9 ± 1 | 2.0 | 493 ± 7 | 1.0 |

*Affinity measurements were carried out by BIAcore as described above. Residue numbering is according to EU (Kabat et al., 1991, supra). Differences in free energy changes are calculated as the differences between the Δgs of wild type and mutant reactions (ΔΔG = ΔG_{wild type} − ΔGₘᵤₜₐₙₜ).
NB, no binding.
NA, not-applicable.

FcRn-Mediated Transfer Assay

[0633] This assay follows the protocol disclosed in PCT publication WO 97/34631. Radiolabeled modified hinge-Fc fragments at various concentration (1 μg/ml-1 mg/ml) are added to the one side of the transwell and the transfer of the fragments mediated by FcRn-expressing monolayer of the cells can be quantitated by measuring the radioactivity on the other side of the transwell.

### 6.17.6.2 In Vivo Pharmacokinetic Study

[0634] In order to determine the half-life of the modified IgG hinge-Fc, modified hinge-Fc fragments are radiolabelled with ¹²⁵I (approximate specific activity of 10⁷ cpm/μg) and dissolved in saline (pH 7.2). The solution is injected intravenously into BALB/c mice (Harlan, Indianapolis, Ind.), which have been given NaI-containing water previously to block the thyroid, in a volume not more than 150 μl and with a radioactivity of 10×10^{6-50×10}⁶ cpm. The mice are bled from the retro-orbital sinus at various time points, for example, at 3 minutes to 72 hours after the injection, into heparinized capillary tubes and the plasma collected from each sample is counted for radioactivity.

[0635] To generate the data provided in FIG. 28, 10 animals were used for each molecule assayed with 2.5 μg of antibody injected per animal. Antibody serum levels were determined using an anti-human IgG ELISA (FIG. 28). There seems to be an inverse correlation between affinity to mouse FcRn and persistence in serum. This might be due to the significant amount of binding of the mutants observed at pH 7.2, which leads to the sequestration (i.e., lack of release in the serum) of the molecules. Preliminary data (not shown) suggests increased transport of the mutants to the lung. Additionally, since the mutants exhibit lower levels of binding to human FcRn than murine FcRn (see FIGS. 26A-26H), antibody serum levels are expected to be higher in primates and humans.

### 6.17.6.3 Surface Plasmon Resonance Analyses

[0636] The interaction of soluble murine and human FcRn with immobilized human IgG1 variants was monitored by surface plasmon resonance detection using a BIAcore 3000 instrument (Pharmacia Biosensor, Uppsala, Sweden). No aggregated material which could interfere with affinity measurements (van der Merwe et al., EMBO J., 12:4945-4954, 1993; van der Merwe et al., Biochemistry, 33:10149-10160, 1994) was detected by gel filtration. Protein concentrations were calculated by the bicinchoninic acid (BCA) method for both human and murine FcRn or using the 1% extinction coefficient at 280 nm of 1.5 for IgG1 wild type and variants. The latter were coupled to the dextran matrix of a CM5 sensor chip (Pharmacia Biosensor) using an Amine Coupling Kit as described (Johnsson et al. Anal. Biochem. 198 (1992) 268-277). The protein concentrations ranged from 3-5 μg/ml in 10 mM sodium acetate, pH 5.0. The activation period was set for 7 minutes at a flow rate of 10 μl/min and the immobilization period was set to between 10 and 20 minutes at a flow rate of 10 μl/min. Excess reactive esters were quenched by injection of 70 μl of 1.0 methanolamine hydrochloride, pH 8.5. This typically resulted in the immobilization of between 500 and 4000 resonance units (RU). Human and murine FcRn were buffer exchanged against 50 mM PBS buffer pH 6.0 containing 0.05% Tween 20. Dilutions were made in the same buffer. All binding experiments were performed at 25° C. with concentrations ranging from 120 to 1 μg/ml at a flow rate of 5 to 10 μl/min; data were collected for 25 to 50 minutes and three 1-minute pulses of PBS buffer pH 7.2 were used to regenerate the surfaces. FcRn was also flowed over an uncoated cell and the sensorgrams from these blank runs subtracted from those obtained with IgG1-coupled chips. Runs were analyzed using the software BIAevaluation 3.1 (Pharmacia). Association constants (K_{A}s) were determined from Scatchard analysis by measuring the concentration of free reactants and complex at equilibrium after correction for nonspecific binding. In equilibrium binding BIAcore experiments (Karlsson et al., 1991, supra; van der Merwe et al., 1993, supra; van der Merwe et al., 1994, supra; Raghavan et al., Immunity, 1:303-315, 1994; Malchiodi et al., J. Exp. Med., 182:1833-1845, 1995), the concentration of the complex can be assessed directly as the steady-state response. The concentration of free analyte (human or murine FcRn) is equal to the bulk analyte concentration since analyte is constantly replenished during sample injection. The concentration of free ligand on the surface of the sensor chip can be derived from the concentration of the complex and from the total binding capacity of the surface as K_{A}═R_{eq}/C(Rₘₐₓ—R_{eq}) where C is the free analyte concentration, R_{eq} is the steady-state response, and Rₘₐₓ is the total surface binding capacity. Rearranging, the equation reads: R_{eq}/C═K_{A}Rₘₐₓ—K_{A}R_{eq}.

[0637] A plot of R_{eq}/C versus R_{eq} at different analyte concentrations thus gives a straight line from which K_{A} can be calculated (see Table 34). Errors were estimated as the standard deviation for two or three independent determinations and were<20%.

[0638] Representative mutations identified after panning libraries 1 through 4 (FIG. 24, Table 33) were introduced into the Fc portion of a human IgG1. Injection of different concentrations of human or murine FcRn over the immobilized IgG1 variants gave concentration-dependent binding. Typical resonance profiles for equilibrium binding of the mutant M252Y/S254T/T256E to murine and human FcRn are shown in FIGS. 25A and 25B. To estimate apparent K_{A}s, concentrations of FcRn ranging from 120 to 1 μg/ml were used. In all cases, equilibrium (or near-equilibrium) binding levels were reached within 50 minutes. To estimate the increase in RU resulting from the non specific effect of protein on the bulk refractive index, binding of FcRn to an uncoated cell was measured and the sensorgrams from these blank runs subtracted from those obtained with IgG1-coupled chips. The scatchard plots for the binding of the mutant M252Y/S254T/T256E to murine and human FcRn are shown in FIGS. 25C and 25D. The plots were all linear, and apparent K_{A}s were calculated from the relevant slopes. Measurements were carried out in duplicate or triplicate and confirmed that the immobilized IgGs retained their original binding activity.

[0639] Since there are two non-equivalent binding sites on mouse IgG1 for murine FcRn with affinities of <130 nM and 6 μM (Sanchez et al., Biochemistry, 38:9471-9476, 1999; Schuck et al., Mol. Immunol., 36:1117-1125, 1999; Ghetie and Ward, Ann. Rev. Immunol., 18:739-766, 2000), the receptor was used in solution to avoid avidity effects that arise when IgG1 binds to immobilized FcRn. Consistent with this, systematically higher affinities are observed when FcRn, rather than IgG, immobilized on the biosensor chip (Popov et al., 1996, supra; Vaughn and Bjorkman, Biochemistry, 36:9374-9380, 1997; Martin and Bjorkman, Biochemistry, 38:12639-12647; West and Bjorkman, Biochemistry, 39:9698-9708, 2000). Under our experimental BIAcore conditions, mainly interactions corresponding to the higher-affinity association (i.e., single liganded-receptor) are measured, according for the linearity of the scatchard plots (FIGS. 25C and 25D).

[0640] BIAcore analysis was also used to compare the affinity of wild type IgG1 and IgG1 mutants. Phage-derived IgG1 mutants exhibiting a significant increase in affinity towards murine FcRn at pH 6.0 (ΔΔG≧1.0 kcal/mol) also shoed significant binding to the mouse receptor at pH 7.2 with SPR signal_{pH7.4}/SPR signal_{pH6.0}>0.6 at saturation. IgG1 mutants with moderate increase in affinity towards murine FcRn at pH 6.0 (ΔΔG<0.4 kcal/mol) bound very poorly to the mouse receptor at pH 7.2. In contrast, IgG1 mutants exhibiting large affinity increase towards human FcRn at pH 6.0 (ΔΔG≧1.0 kcal/mol) only showed minimal binding to the human receptor at pH 7.4 with SPR signal_{pH7.4}/SPR signal_{pH6.0}<0.15 at saturation.

### 6.18 Generation of a A4B4L1FR-S28R (MEDI-524) Modified Antibody

[0641] This example illustrate the generation of a A4B4L1FR-S28R (MEDI-524) M252Y/S254T/T256E (a YTE) variant.

[0642] The heavy chain of a humanized MEDI-524 anti-RSV monoclonal antibody was cloned into a mammalian expression vector encoding a human cytomegalovirus major immediate early (hCMVie) enhancer, promoter and 5′-untranslated region (Boshart et al (1985) Cell 41:521-530.). In this system, a human γ1 chain is secreted along with a human κ chain (Johnson et al. (1997) Infect. Dis. 176:1215-1224). A combination of three mutations (M252Y/S254T/T256E; Example 6.17, and Dall'Acqua et al.(2002), J. Immunol. 169:5171-5180) was introduced into the heavy chain of MEDI-524. Generation of these three mutations (collectively referred to as “YTE”) at positions 252, 254 and 256 (EU Index, as in Kabat et al. (1991) Sequences of proteins of immunological interest. (U.S. Department of Health and Human Services, Washington, D.C.) 5^{th} ed., was carried out by site-directed mutagenesis using a Quick Change® XL Mutagenesis Kit (Stratagene, Calif.) and the primers: 5′-GCATGTGACCTCAGGTTCCCGAGTGATATAGAGGGTGTCCTTGGG-3′ (SEQ ID NO:382) and 5′-CCCAAGGACACCCTCTATATCACTCGGGAACCTGAGGTCACATGC-3′ (SEQ ID NO:383) according to the manufacturer's instructions. This generated “MEDI-524-YTE.” The sequences were verified using an ABI 3100 sequencer and are reported in FIG. 29. NS0 cells were then stably transfected with the corresponding antibody constructs, and the secreted immunoglobulins were expressed and purified using standard protocols.

Surface Plasmon Resonance (BIAcore) Measurements

[0643] The interaction of soluble human and Cynomolgus Monkey FcRn with immobilized MEDI-524 and MEDI-524-YTE variant was monitored by surface plasmon resonance detection using a BIAcore 3000 instrument (Pharmacia Biosensor, Uppsala, Sweden). Protein concentrations were calculated by the bicinchoninic acid method for both human and Cynomolgus Monkey FcRn or using the 1% extinction coefficient at 280 nm of 1.47 for MEDI-524 and MEDI-524-YTE. Both IgGs were coupled to the dextran matrix of a CM5 sensor chip (Pharmacia Biosensor) using an Amine Coupling Kit as described (Johnsson et al. (1992) Anal. Biochem. 198:268-277) at a surface density of between 947 and 1244 RUs. Human and Cynomolgus Monkey FcRn were buffer-exchanged against 50 mM Phosphate Buffered Saline (PBS) pH 6.0 or 7.4 containing 0.05% Tween 20. Dilutions were made in the same buffers. All binding experiments were performed at 25° C. with FcRn concentrations typically ranging from 2.86 μM to 6 nM at a flow rate of 5 μL/min; data were collected for approximately 50 min and three 1-min pulses of PBS pH 7.4 containing 0.05% Tween 20 were used to regenerate the surfaces. FcRn was also flowed over an uncoated cell and the sensorgrams from these blank runs subtracted from those obtained with IgG-coupled chips. Runs were analyzed using the software BIAevaluation 3.1 (Pharmacia). Dissociation constants (K_{d}s) were determined by fitting the binding isotherms to a one-site binding model using GraphPad Prism (GraphPad Software, Inc., CA). Values are reported in Table 35 below. Errors were estimated as the mean standard deviation for at least 2 independent determinations. As shown in Table 35, MEDI-524-YTE exhibits an affinity increase of 11 and 9-fold towards human and Cynomolgus Monkey FcRn, respectively, when compared with MEDI-524. Furthermore, MEDI-524-YTE retains a significant pH dependency of binding to both human and Cynomolgus monkey FcRn, exhibiting only marginal binding at pH 7.4 (see FIG. 30).

TABLE 35
Dissociation constants for the binding of MEDI-524 and
MEDI-524-YTE variant to Human and Cynomolgus Monkey FcRn.

| | K_{d}-Cynomolgus | FcRnK_{d}-Human FcRn |
|---|---|---|
| Molecule | (nM) | (nM) |
| MEDI-524 | 1196 ± 240 | 2249 ± 84 |
| MEDI-524-YTE | 134 ± 7 | 210 ± 80 |

Microneutralization Assay

[0644] The microneutralization assay was carried out essentially as described (Johnson et al. (1997) Infect. Dis. 176:1215-1224). Briefly, dilutions of MEDI-524 or MEDI-524-YTE were made in quadruplicate in a 96-well plate. RSV (ATCC, Manassas, Va.) was added to each well and incubated for 2 h at 37° C. in 5% CO₂. 2×10⁴ Hep-2 cells (ATCC, Manassas, Va.) were then added to each well and incubated for 5 days at 37° C. in 5% CO₂. Cells were then washed three times with PBS containing 0.1% Tween 20 and fixed with acetone. Viral replication was quantified by successive incubations with a mouse anti-RSV monoclonal antibody (Chemicon, Temecula, Calif.) and a horse radish peroxidase conjugate of a goat anti-mouse IgG (TAGO, Burlingame, Calif.). Peroxidase activity was detected with 3,3′,5,5′-tetramethylbenzidine (TMB) and the reaction was quenched with 2 MH₂SO₄. The absorbance was read at 450 nm and plotted for each antibody concentration (See FIG. 31). As shown in FIG. 31, both MEDI-524 and MEDI-524-YTE exhibit undistinguishable RSV microneutralization properties.

Cynomolgus Monkey Pharmacokinetics Study

[0645] A pharmacokinetics (PK) study was conducted at Gene Logic (Gene Logic Laboratories, Gaithersburg, Md.). Twenty (20) male Cynomolgus Monkeys were randomized and assigned to one of two study groups. Each animal received a single intravenous dose of MEDI-524 (group 1) or MEDI-524-YTE (group 2) at 30 mg/kg. Blood samples were drawn prior to dosing on day 0, at 1 and 4 h after dosing, and at 1, 2, 3, 4, 6, 8, 10, 12, 14, 16, 20, 24, 31, 41 and 55 days after dosing. The concentrations of MEDI-524 or MEDI-524-YTE in serum samples were determined by an anti-human IgG enzyme-linked immunosorbent assay (ELISA). In this assay, MEDI-524 and MEDI-524-YTE are captured by a goat anti-MEDI-524 antibody (anti-idiotype, MedImmune, Inc.) coated to a microtiter plate. Any bound MEDI-524 or MEDI-524-YTE is detected using a goat anti-human IgG antibody linked to biotin. Streptavidin conjugated to horseradish peroxidase followed by tetramethylbenzidine (TMB) as substrate is used for the colorimetric reaction. The corresponding serum clearance curves are shown in FIG. 32. For each injection, a noncompartmental model was fitted for the serum concentration data of each animal. Descriptive statistics were calculated for each of the pharmacokinetics parameters and are reported in Table 36 below. The Wilcoxon test was used to compare the half-lives and AUCs (see footnote to Table 36) between the two treatment groups. As shown in Table 36, the half-lives in group 2 were nearly four times as much as those of group 1. Likewise, the AUCs in group 2 were nearly five times as much as those of group 1. The Wilcoxon test suggests the group differences in half-life and AUCs were statistically significant (p<0.001). The mean maximum serum antibody concentration is very similar between group 1 and 2, indicating that MEDI-524 and MEDI-524-YTE are distributed to the circulation in a similar fashion.

TABLE 36
Descriptive Summary of the Pharmacokinetics Parameters
for MEDI-524 and MEDI-524-YTE in Cynomolgus Monkeys.

| | β phase t_{1/2}^{a} | C_{MAX}^{b} | AUC^{c} |
|---|---|---|---|
| Molecule | (days) | (μg/ml) | (μg · hr/mL) |
| MEDI-524 | 5.7 ± (1.4) | 644 ± (211) | 61172 ± (15529) |
| MEDI-524-YTE | 21.2 ± (9.1) | 639 ± (248) | 294836 ± (95212) |

^{a}Half-life of serum concentration.
^{b}Peak serum concentration.
^{c}Area under the serum concentration-time curve to infinity.
Numbers in parentheses are standard deviations.

Conclusion

[0646] Thus, based upon the above results of introducing the Fc mutations M252Y/S254T/T256E into MEDI-524, an ultra-potent anti-RSV mAb, the serum half-life will likely be similarly increased in human. It is likely that by combining the ultra-potency of MEDI-524 and other high potency (and/or high affinity and/or high avidity) antibodies with the half-life extension property of the Fc mutations, the modified antibodies of the invention, including MEDI-524-YTE, can be used as long-lasting drugs that require only one or two administrations for the entire treatment course, e.g., during a RSV season. The Cynomolgus Monkey study discussed above has already shown that such construct (MEDI-524 with Fc mutations (i.e., MEDI-524-YTE)) had an about fourfold increase in serum half-life when compared with the MEDI-524 wild-type antibody, and the concentration under the curve (PK) was also substantially increased (by a factor of about 5-fold) (see FIG. 32). Additionally the mutations on Fc did not alter the ability of MEDI-524 to neutralize RSV in a microneutralization assay nor did they affect the binding affinity to its cognate antigen.

### 6.19 Generation of a A4B4L1FR-S28R (MEDI-524) Modified Antibody

Introduction

[0647] The objective of this study was to evaluate potential cross-reactivity of A4b4 and L1FR-528R (MEDI-524) with cryosections of human lung and skin tissue. In the human tissue cross-reactivity studies, a fluoresceinated form of the A4b4 and L1FR-528R antibodies were used to evaluate binding: A4b4-FITC and L1FR-528R-FITC.

[0648] The preliminary studies which determined the reagent concentrations and staining conditions to be employed in the tissue cross reactivity study, and the tissue cross-reactivity study itself were conducted in accordance with PAI Standard Operating Procedures (SOPs) and in “the spirit” of the GLP regulations of the US FDA (21 CFR Part 58 and subsequent amendments). However, the study was considered to be a research study and was conducted in compliance with the GLP regulations. The reagent concentrations determined by the preliminary studies were validated by reproducibility of the positive controls in the tissue cross reactivity study.

### Materials and Methods

[0649] In order to detect binding, the unconjugated A4b4, and L1FR-S28R, or the FITC-conjugated A4b4-FITC and L1FR-S28R-FITC were applied to normal human tissues (one source per tissue) at two concentrations (10 μg/mL and 1 μg/mL). Tissues that had been obtained previously via necropsy or surgical biopsy were embedded in TISSUE-TEK® O.C.T. medium, frozen on dry ice, and stored in sealed plastic bags below −70° C. Tissues were sectioned at approximately 5 μm, fixed for 10 minutes in acetone, and placed in a desiccator to dry overnight. Slides were stored below −70° C. until staining. The slides were also fixed for 10 seconds in 10% NBF just prior to staining.

[0650] Purified RSV F UV-adhered to slides served as the positive control. Parathyroid hormone related protein (PTHrP) UV-adhered to slides was used as a negative control tissue. Other controls were produced by substitution of human antibody of the same immunoglobulin subclass (IgG1-kappa) but different antigenic specificity for the test article (negative control antibody), with or without conjugated FITC.

Antibodies and Reagents

[0651] The following reagents were used in the study:
[0652] 1. A4b4, a human IgG1 monoclonal antibody directed against RSV F protein, Lot No. 1411.153, PAI No. A3911, MedImmune, Inc, Gaithersburg, Md. The A4b4 antibody was FITC conjugated using routine methods known in the art, and was designated A4b4-FITC, Lot No. AD290502B, PAI No. A3843.
[0653] 2. L1FR-S28R (MEDI-524), a human IgG1 monoclonal antibody directed against RSV F protein, Lot No. 1411.142, PAI No. A3912, MedImmune, Inc, Gaithersburg, Md. The L1FR-S28R antibody was FITC conjugated using routine methods known in the art, and was designated MEDI-493-FITC, Lot No. AD290502C, PAI No. A3842.
[0654] 3. Negative control antibody human monoclonal IgG1 kappa antibody, Lot No. 071K9270, Sigma, St. Louis, Mo., PAI No. A3914. The unconjugated negative control antibody was FITC conjugated using routine methods known in the art, and was designated HuIgG-FITC, Lot No. AD280602, PAI No A3870.
[0655] 4. Unconjugated mouse anti-fluorescein, Sigma, St. Louis, Mo., Lot No. 30K4884, PAI No. A3536.
[0656] 5. ENVISION™ Kit, Dako, Carpinteria, Calif., Lot No. 06220, PAI No. K699.
[0657] 6. Casein, Sigma, St. Louis, Mo., Lot No. 41K0165.
[0658] 7. Sodium chloride, Sigma, St. Louis, Mo., Lot No. 121K16341.
[0659] 8. Sodium phosphate, dibasic, Sigma, St. Louis, Mo., Lot No. 91K0117.
[0660] 9. Potassium phosphate, monobasic, Sigma, St. Louis, Mo., Lot No. 101K0025.
[0661] 10. Normal goat serum, Vector Laboratories, Burlingame, Calif., Lot No. N0805.
[0662] 11. Acetone, VWR, West Chester, Pa., Lot No. 421622.
[0663] 12. 10% NBF, EM Science, Gibbstown, N.J., Lot No. 2145.
[0664] 13. β-D(+) Glucose, Sigma, St. Louis, Mo., Lot No. 11K0024.
[0665] 14. Human gamma-globulins, Sigma, St. Louis, Mo., Lot No. 12K7603.
[0666] 15. Glucose Oxidase, Sigma, St. Louis, Mo., Lot No. 31K3800.
[0667] 16. Bovine Serum Albumin, Sigma, St. Louis, Mo., Lot No. 22K1266.
[0668] 17. Sodium Azide, Sigma, St. Louis, Mo., Lot No. 41K0236.
[0669] 18. Trizma Base, Sigma, St. Louis, Mo., Lot No. 100K5433.
[0670] 19. Avidin Biotin Blocking Kit, Vector Laboratories, Burlingame, Calif., Lot No. N0503.
[0671] 20. Goat Anti-Human IgG, Fcγ fragment specific, Jackson Laboratories, West Grove, Pa., Lot No. 52408.
[0672] 21. ABC “Elite” Kit, Vector Laboratories, Burlingame, Calif., Lot No. PK-6100, PAI No. K692.
[0673] 22. DAB Tablets, Sigma, St. Louis, Mo., Lot No. 5 1K8211.
[0674] 23. Norman Mouse Serum, Sigma, St. Louis, Mo., Lot No. 98F9407.
[0675] 24. Sheared Salmon Sperm DNA, Eppendorf, Westbury, N.Y., Lot No. KL176A.
[0676] 25. Hypercalcemia of Malignancy Factor (PTHrP) 1-34, Sigma, St. Louis, Mo., Lot No. 79H49582.
[0677] 26. Frozen normal human tissues, National Research Disease Interchange, Philadelphia, Pa., Pathology Associates, Frederick, Md.
[0678] 27. Frozen normal cotton rat tissues, supplied by Sponsor, MedImmune, Inc., Gaithersburg, Md.
[0679] 28. Frozen normal cynomolgus monkey and chimpanzee lung, Pathology Associates—A Charles River Company, Frederick, Md.
   Tissue Staining Method

[0680] Table 37 depicts the immunoperoxidase staining method used.

TABLE 37
Immunoperoxidase Staining Method - Human Tissues

| | Secondary | Tertiary | |
|---|---|---|---|
| Primary Antibody | Antibody | Antibody | DAB |
| 1. Test Article (MEDI-493-FITC, | X | X | X |
| A4b4-FITC, or L1FR-S28R-FITC) | | | |
| (2 concentrations) | | | |
| 2. Negative Control Antibody | X | X | X |
| (Human IgG1 kappa-FITC) | | | |
| (2 concentrations) | | | |

[0681] An indirect immunoperoxidase procedure was performed. Acetone/formalin-fixed cryosections were rinsed in phosphate-buffered saline (PBS [0.3 M NaCl, pH 7.2]). Endogenous peroxidase was blocked by incubating the slides with the peroxidase solution provided in the Dako ENVISON™ Kit. Next, the slides were treated with a protein block designed to reduce nonspecific binding. The protein block was prepared as follows: PBS [0.3 M NaCl, pH 7.2]; 0.5% casein; 5% human gamma globulins; and 1 mg/mL heat-aggregated human IgG (prepared by heating a 5 mg/mL solution at 63° C. for 20 minutes and cooling to room temperature). Following the protein block, the test articles and the negative control antibody were applied to the slides for one hour at room temperature. Then, the slides were rinsed one time with TBS (0.15 M NaCl, pH 7.8) and two times with PBS (0.3 M NaCl, pH 7.2), and treated with the unconjugated secondary antibody (mouse anti-fluorescein) for 30 minutes at room temperature. Next, the slides were rinsed two times with PBS (0.3 M NaCl, pH 7.2), treated with the peroxidase-labeled goat anti-mouse IgG polymer supplied in the Dako ENVISION™ Kit for 30 minutes. Then, the slides were rinsed two times with PBS (0.3 M NaCl, pH 7.2), and treated with the substrate-chromogen (DAB) solution supplied in the Dako ENVISION™ Kit for 8 minutes. All slides were rinsed in water, counterstained with hematoxylin, dehydrated and coverslipped for interpretation.

[0682] TBS (0.15 M NaCl, pH 7.8)+5% human gamma globulins served as the diluent for all antibodies. In addition, 1 mg/mL heat-aggregated human IgG was added to the primary antibody diluent.

[0683] All slides were read by the a pathologist to identify the tissue or cell type stained and intensity of staining (graded±[equivocal], 1+[weak], 2+[moderate], 3+[strong], 4+[intense], Neg [negative]).

### Results and Discussion

Human Tissue Positive and Negative Controls

[0684] The results are summarized in Table 38.

TABLE 38
Cross-Reactivity of A4b4-FITC, and L1FR-S28R-FITC with Normal
Human Tissues

| | | | | | | Negative | |
|---|---|---|---|---|---|---|---|
| | | | | | | Control | |
| | | | | | | α- | |
| | | | | L1FR- | | Human | |
| | | A4b4- | | S28R- | | IgG- | |
| | | FITC | | FITC | | FITC | |
| Tissue | Source | 10 μg/ml | 1 μg/ml | 10 μg/ml | 1 μg/ml | 10 μg/ml | 1 μg/ml |
| Purified RSV F | RSV F | 3-4+ | 2-3+ | 3-4+ | 2-3+ | Neg | Neg |
| Protein | Protein | | | | | | |
| (Positive Control) | | | | | | | |
| Purified PTHrP | PTHrP | Neg | Neg | Neg | Neg | Neg | Neg |
| Protein | Protein | | | | | | |
| (Negative Control) | | | | | | | |
| Lung | HT456 | | | | | | |
| Epithelium, alveolar | | 2-3+ | Neg | Neg | Neg | Neg | Neg |
| and bronchiolar | | (frequent)* | | | | | |
| (membrane and | | | | | | | |
| cytoplasm) | | | | | | | |
| Endothelium | | 2-3+ | Neg | Neg | Neg | Neg | Neg |
| (cytoplasm) | | (frequent)* | | | | | |
| Spindloid/dendritic | | 2-3+ | Neg | Neg | Neg | Neg | Neg |
| cells (cytoplasm) | | (occas)* | | | | | |
| Other elements | | Neg | Neg | Neg | Neg | Neg | Neg |
| Skin | HT545 | | | | | | |
| Epithelium, surface | | 1-2+ | Neg | Neg | Neg | Neg | Neg |
| and adnexal, basal | | (frequent)* | | | | | |
| layers (membrane and | | | | | | | |
| cytoplasm) | | | | | | | |
| Endothelium, dermal | | 1-2+ | Neg | Neg | Neg | Neg | Neg |
| vessels (cytoplasm) | | (frequent)* | | | | | |
| Other elements | | Neg | Neg | Neg | Neg | Neg | Neg |

1+ = weak,
2+ = moderate,
3+ = strong,
4+ = intense,
Neg = Negative,
*= Reactivity of uncertain specificity,

[0685] Using a direct immunoperoxidase method, the A4b4 and L1FR-S28R antibodies specifically stained the positive control purified RSV F, which had been UV-adhered to slides. Reactivity with positive control antigen and tissue elements was strong to intense at both concentrations examined (10 μg/mL and 1 μg/mL).

[0686] The he A4b4 and L1FR-S28R antibodies did not specifically react with negative control PTHrP which had been UV-adhered to slides. The negative control antibody HuIgG1-kappa, did not specifically react with either the positive control antigen (RSV F) or negative control antigen (PTHrP).

Cross-Reactivity in Human Tissues

[0687] Results are shown in FIG. 33 and summarized in Table 38. The skin and lung tissues had staining that was interpreted to be cross-reactivity of uncertain specificity with the A4b4 antibody. The following cell types were observed to have this staining: alveolar and bronchiolar epithelium in the lung (moderate to strong staining at 10 μg/mL); surface and adnexal epithelium in the skin (weak to moderate staining at 10 μg/mL); and endothelium of dermal vessels (weak to moderate staining at 10 μg/mL). This staining was mostly observed at the highest concentration of test article.

[0688] However, in contrast to the results of A4b4, L1FR-S28R showed tissue cross-reactivity that was similar to the negative control isotype antibody.

### 7. EQUIVALENTS

[0689] Those skilled in the art will recognize, or be able to ascertain using no more than routine experimentation, many equivalents to the specific embodiments of the invention described herein. Such equivalents are intended to be encompassed by the following claims.

[0690] All publications, patents and patent applications mentioned in this specification are herein incorporated by reference into the specification to the same extent as if each individual publication, patent or patent application was specifically and individually indicated to be incorporated herein by reference.

### 8. SEQUENCE LISTING

[0691] This application includes a Sequence Listing submitted on compact disc, recorded on two compact discs (CD-R), including one duplicate, containing Filename “Sequence Lisiting—Atty Docket No. 10271-174-999, Losonsky e.txt” of file size 620,495 bytes created Oct. 31, 2005. The sequence listing on the compact discs is incorporated by reference herein in its entirety.

What is claimed:

1. A method of preventing the progression of a RSV infection from the upper respiratory tract to the lower respiratory tract, the method comprising administering to a patient an effective amount of an antibody that immunospecifically binds to a RSV F antigen, said antibody comprising:
(a) a heavy chain comprising:
(1) a heavy chain variable (VH) domain having the amino acid sequence SEQ ID NO:48,
(2) a VH chain having the amino acid sequence SEQ ID NO:254;
(3) a VH CDR1 having the amino acid sequence SEQ ID NO:10;
(4) a VH CDR2 sequence having the amino acid sequence SEQ ID NO:19;
(5) a VH CDR3 having the amino acid sequence SEQ ID NO:20;
(6) a VH CDR1 having the amino acid sequence SEQ ID NO:10 and a VH CDR2 sequence having the amino acid sequence SEQ ID NO:19;
(7) a VH CDR1 having the amino acid sequence SEQ ID NO:10 and a VH CDR3 having the amino acid sequence SEQ ID NO:20;
(8) a VH CDR2 sequence having the amino acid sequence SEQ ID NO:19 and a VH CDR3 having the amino acid sequence SEQ ID NO:20; or
(9) a VH CDR1 having the amino acid sequence SEQ ID NO:10, a VH CDR2 sequence having the amino acid sequence SEQ ID NO:19, and a VH CDR3 having the amino acid sequence SEQ ID NO:20; and/or
(b) a light chain comprising:
(1) a light chain variable (VL) domain having the amino acid sequence SEQ ID NO:11,
(2) a VL chain having the amino acid sequence SEQ ID NO:255;
(3) a VL CDR1 having the amino acid sequence SEQ ID NO:39;
(4) a VL CDR1 having the amino acid sequence SEQ ID NO:39 and a VL CDR2 sequence having the amino acid sequence SEQ ID NO:5;
(5) a VL CDR1 having the amino acid sequence SEQ ID NO:39 and a VL CDR3 having the amino acid sequence SEQ ID NO:6; or
(6) a VL CDR1 having the amino acid sequence SEQ ID NO:39, a VL CDR2 sequence having the amino acid sequence SEQ ID NO:5, and a VL CDR3 having the amino acid sequence SEQ ID NO:6.

2. A method of preventing, managing, treating and/or ameliorating an RSV upper respiratory tract infection or otitis media, or a symptom thereof, the method comprising administering to a patient an effective amount of an antibody that immunospecifically binds to a RSV F antigen, said antibody comprising:
(a) a heavy chain comprising:
(1) a heavy chain variable (VH) domain having the amino acid sequence SEQ ID NO:48,
(2) a VH chain having the amino acid sequence SEQ ID NO:254;
(3) a VH CDR1 having the amino acid sequence SEQ ID NO:10;
(4) a VH CDR2 sequence having the amino acid sequence SEQ ID NO:19;
(5) a VH CDR3 having the amino acid sequence SEQ ID NO:20;
(6) a VH CDR1 having the amino acid sequence SEQ ID NO:10 and a VH CDR2 sequence having the amino acid sequence SEQ ID NO:19;
(7) a VH CDR1 having the amino acid sequence SEQ ID NO:10 and a VH CDR3 having the amino acid sequence SEQ ID NO:20;
(8) a VH CDR2 sequence having the amino acid sequence SEQ ID NO:19 and a VH CDR3 having the amino acid sequence SEQ ID NO:20; or
(9) a VH CDR1 having the amino acid sequence SEQ ID NO:10, a VH CDR2 sequence having the amino acid sequence SEQ ID NO:19, and a VH CDR3 having the amino acid sequence SEQ ID NO:20; and/or
(b) a light chain comprising:
(1) a light chain variable (VL) domain having the amino acid sequence SEQ ID NO:11,
(2) a VL chain having the amino acid sequence SEQ ID NO:255;
(3) a VL CDR1 having the amino acid sequence SEQ ID NO:39;
(4) a VL CDR1 having the amino acid sequence SEQ ID NO:39 and a VL CDR2 sequence having the amino acid sequence SEQ ID NO:5;
(5) a VL CDR1 having the amino acid sequence SEQ ID NO:39 and a VL CDR3 having the amino acid sequence SEQ ID NO:6; or
(6) a VL CDR1 having the amino acid sequence SEQ ID NO:39, a VL CDR2 sequence having the amino acid sequence SEQ ID NO:5, and a VL CDR3 having the amino acid sequence SEQ ID NO:6.

3. A method of preventing, managing, treating and/or ameliorating RSV disease or a symptom thereof, the method comprising administering to a patient an effective amount of an antibody that immunospecifically binds to a RSV F antigen, said antibody comprising:
(a) a heavy chain comprising:
(1) a heavy chain variable (VH) domain having the amino acid sequence SEQ ID NO:48,
(2) a VH chain having the amino acid sequence SEQ ID NO:254;
(3) a VH CDR1 having the amino acid sequence SEQ ID NO:10;
(4) a VH CDR2 sequence having the amino acid sequence SEQ ID NO:19;
(5) a VH CDR3 having the amino acid sequence SEQ ID NO:20;
(6) a VH CDR1 having the amino acid sequence SEQ ID NO:10 and a VH CDR2 sequence having the amino acid sequence SEQ ID NO:19;
(7) a VH CDR1 having the amino acid sequence SEQ ID NO:10 and a VH CDR3 having the amino acid sequence SEQ ID NO:20;
(8) a VH CDR2 sequence having the amino acid sequence SEQ ID NO:19 and a VH CDR3 having the amino acid sequence SEQ ID NO:20; or
(9) a VH CDR1 having the amino acid sequence SEQ ID NO:10, a VH CDR2 sequence having the amino acid sequence SEQ ID NO:19, and a VH CDR3 having the amino acid sequence SEQ ID NO:20; and/or
(b) a light chain comprising:
(1) a light chain variable (VL) domain having the amino acid sequence SEQ ID NO:11,
(2) a VL chain having the amino acid sequence SEQ ID NO:255;
(3) a VL CDR1 having the amino acid sequence SEQ ID NO:39;
(4) a VL CDR1 having the amino acid sequence SEQ ID NO:39 and a VL CDR2 sequence having the amino acid sequence SEQ ID NO:5;
(5) a VL CDR1 having the amino acid sequence SEQ ID NO:39 and a VL CDR3 having the amino acid sequence SEQ ID NO:6; or
(6) a VL CDR1 having the amino acid sequence SEQ ID NO:39, a VL CDR2 sequence having the amino acid sequence SEQ ID NO:5, and a VL CDR3 having the amino acid sequence SEQ ID NO:6.

4. The method of claim 1, 2 or 3 wherein antibody comprises an IgG constant domain.

5. The method of claim 4, wherein the IgG constant domain is a human IgG1 constant domain.

6. The method of claim 5, wherein the IgG1 constant domain comprises a tyrosine at position 252, a threonine at position 254 is a threonine, and a glutamic acid at position 256, numbered according to the EU Index as in Kabat et al. (1991). Sequences of proteins of immunological interest. (U.S. Department of Health and Human Services, Washington, D.C.) 5^{th} ed.

7. The method of claim 6, wherein the in vivo half-life of the antibody is extended by about two-fold, about three-fold, about four-fold, about five-fold, about six-fold, about seven-fold, about eight-fold, about nine-fold, or about ten fold as compared to the same antibody comprising an IgG1 constant domain without a tyrosine at position 252, a threonine at position 254 is a threonine, and a glutamic acid at position 256.

8. The method of claim 1, 2 or 3, wherein the antibody comprises a VH chain having the amino acid sequence SEQ ID NO:254 and a VL chain having the amino acid sequence SEQ ID NO:255.

9. The method of claim 8, wherein the VH chain constant domain comprises a tyrosine at position 252, a threonine at position 254 is a threonine, and a glutamic acid at position 256, numbered according to the EU Index as in Kabat et al.

10. The method of claim 1, 2, or 3, wherein the antibody has reduced or no cross-reactivity with a human tissue sample as compared to a second antibody.

11. The method of claim 10, wherein the second antibody is an A4B4 antibody or wherein the second antibody is a human IgG1 monoclonal antibody directed against an antigen other than RSV.

12. The method of claim 11, wherein the tissue sample is skin or lung.

13. The method of claim 1, 2 or 3, wherein the antibody has an association rate (kₒₙ) of at least about 2×10⁵ M⁻¹s⁻¹.

14. The method of claim 13, wherein the kₒₙ is at least about 4×10⁵ M⁻¹s⁻¹.

15. The method of claim 13, wherein the kₒₙ is at least about 5×10⁵ M⁻¹s⁻¹.

16. The method of claim 13, wherein the kₒₙ is at least about 7.5×10⁵ s⁻¹.

17. The method of claim 1, 2 or 3, wherein the antibody has a dissociation rate (k_{off}) of less than about 5×10⁻⁴ s⁻¹.

18. The method of claim 1, 2 or 3, wherein the antibody has a dissociation constant (K_{d}) of less than about 1000 pM.

19. The method of claim 18, wherein the K_{d} is about 50 pM.

20. The method of claim 1, 2 or 3, wherein the antibody has an association constant of (Kₐ) of at least about 10⁹ M⁻¹.

21. The method of claim 20, wherein the Kₐ is at least about 10¹⁰ M⁻¹.

22. The method of claim 19, wherein the Kₐ is at least about 10¹¹ M⁻¹.

23. The method of claim 1, 2 or 3, wherein the effective amount is selected from the group consisting of about 30 mg/kg, about 25 mg/kg, about 20 mg/kg, about 15 mg/kg, about 10 mg/kg, about 5 mg/kg, about 3 mg/kg, about 1.5 mg/kg, about 1 mg/kg, about 0.75 mg/kg, about 0.5 mg/kg, about 0.25 mg/kg, about 0.1 mg/kg, about 0.05 mg/kg, and 0.025 mg/kg.

24. The method of claim 6, wherein the effective amount is selected from the group consisting of about 30 mg/kg, about 25 mg/kg, about 20 mg/kg, about 15 mg/kg, about 10 mg/kg, about 5 mg/kg, about 3 mg/kg, about 1.5 mg/kg, about 1 mg/kg, about 0.75 mg/kg, about 0.5 mg/kg, about 0.25 mg/kg, about 0.1 mg/kg, about 0.05 mg/kg, and 0.025 mg/kg.

25. The method of claim 1, 2 or 3, wherein the patient is a human patient.

26. The method of claim 6, wherein the patient is a human patient.

27. The method of claim 25, wherein the human is human who has had a bone marrow transplant, an elderly human, or a human who has cystic fibrosis, bronchopulmonary dysplasia, congenital heart disease, congenital immunodeficiency or acquired immunodeficiency.

28. The method of claim 26, wherein the human is human who has had a bone marrow transplant, an elderly human, or a human who has cystic fibrosis, bronchopulmonary dysplasia, congenital heart disease, congenital immunodeficiency or acquired immunodeficiency.

29. The method of claim 25, wherein the human is a human infant or a human infant born prematurely.

30. The method of claim 26, wherein the human is a human infant or a human infant born prematurely.

31. The method of claim 1, 2 or 3, wherein the antibody is administered to the patient by intranasal delivery, intramuscular delivery, intradermal delivery, intraperitoneal delivery, intravenous delivery, subcutaneous delivery, oral delivery, pulmonary delivery or combinations thereof.

32. The method of claim 6, wherein the antibody is administered to the patient intranasal delivery, intramuscular delivery, intradermal delivery, intraperitoneal delivery, intravenous delivery, subcutaneous delivery, oral delivery, pulmonary delivery or combinations thereof.

33. The method of claim 1, 2 or 3, wherein the antibody is administered to the patient five times, four times, three times, two times or one time during a RSV season.

34. The method of claim 6, wherein the antibody is administered to the patient five times, four times, three times, two times or one time during a RSV season.

35. The method of claim 1, 2 or 3, wherein the antibody is administered to the patient three times, two times, or one time within three months, two months, or one month prior to a RSV season.

36. The method of claim 6, wherein the antibody is administered to the patient three times, two times, or one time within three months, two months, or one month prior to a RSV season.

37. The method of claim 1 or 2, wherein the antibody is administered to the patient by intranasal delivery, and wherein the effective amount is selected from the group consisting of about 15 mg/kg, about 10 mg/kg, about 5 mg/kg, about 3 mg/kg, about 1.5 mg/kg, about 1 mg/kg, about 0.75 mg/kg, about 0.5 mg/kg, about 0.25 mg/kg, about 0.1 mg/kg, about 0.05 mg/kg, and 0.025 mg/kg.

38. The method of claim 6, wherein the antibody is administered to the patient by intranasal delivery, and wherein the effective amount is selected from the group consisting of about 15 mg/kg, about 10 mg/kg, about 5 mg/kg, about 3 mg/kg, about 1.5 mg/kg, about 1 mg/kg, about 0.75 mg/kg, about 0.5 mg/kg, about 0.25 mg/kg, about 0.1 mg/kg, about 0.05 mg/kg, and 0.025 mg/kg.

39. The method of claim 37, wherein the antibody is administered 1, 2, 3, 4, 5 or 6 times per day.

40. The method of claim 38, wherein the antibody is administered 1, 2, 3, 4, 5 or 6 times per day.

41. The method of claim 39, wherein the antibody is administered 1, 2, 3, 4, 5 or 6 times per day for 2 days, 3 days, 4 days, 5 days, 6 days, 7 days or 14 days.

42. The method of claim 40, wherein the antibody is administered 1, 2, 3, 4, 5 or 6 times per day for 2 days, 3 days, 4 days, 5 days, 6 days, 7 days or 14 days.

The application's sequence listing, which the Patent Office published only in electronic form, follows.

SEQUENCE LISTING (1496 sequences)

SEQ ID NO: 1 - protein, 7 aa, Murine
TSGMSVG

SEQ ID NO: 2 - protein, 16 aa, Murine
DIWWDDKKDYNPSLKS

SEQ ID NO: 3 - protein, 10 aa, Murine
SMITNWYFDV

SEQ ID NO: 4 - protein, 10 aa, Murine
KCQLSVGYMH

SEQ ID NO: 5 - protein, 7 aa, Murine
DTSKLAS

SEQ ID NO: 6 - protein, 9 aa, Murine
FQGSGYPFT

SEQ ID NO: 7 - protein, 120 aa, Artificial Sequence
  Humanized antibody - VH Domain
QVTLRESGPALVKPTQTLTLTCTFSGFSLSTSGMSVGWIRQPPGKALEWLADIWWDDKKDYNPSLKSRLTISKDTSKNQVVLKVTNMDPADTATYYCARSMITNWYFDVWGAGTTVTVSS

SEQ ID NO: 8 - protein, 106 aa, Artificial Sequence
  misc_feature: Humanized antibody - VL Domain
DIQMTQSPSTLSASVGDRVTITCKCQLSVGYMHWYQQKPGKAPKLLIYDTSKLASGVPSRFSGSGSGTEFTLTISSLQPDDFATYYCFQGSGYPFTFGGGTKLEIK

SEQ ID NO: 9 - protein, 120 aa, Artificial Sequence
  Humanized antibody - VH Domain
QVTLRESGPALVKPTQTLTLTCTFSGFSLSTAGMSVGWIRQPPGKALEWLADIWWDDKKDYNPSLKSRLTISKDTSKNQVVLKVTNMDPADTATYYCARSMITNFYFDVWGQGTTVTVSS

SEQ ID NO: 10 - protein, 7 aa, Artificial Sequence
  Amino acid sequence derived from Murine monoclonal antibody and further modified by amino acid substitutions
TAGMSVG

SEQ ID NO: 11 - protein, 106 aa, Artificial Sequence [sequence omitted]

SEQ ID NO: 12 - protein, 10 aa, Artificial Sequence
  Amino acid sequence derived from Murine monoclonal antibody and further modified by amino acid substitutions
SMITNFYFDV

SEQ ID NO: 13 - protein, 106 aa, Artificial Sequence
  Humanized antibody - VL Domain
DIQMTQSPSTLSASVGDRVTITCSASSSVGYMHWYQQKPGKAPKLLIYDTFKLASGVPSRFSGSGSGTEFTLTISSLQPDDFATYYCFQFSGYPFTFGGGTKVEIK

SEQ ID NO: 14 - protein, 10 aa, Artificial Sequence
  Amino acid sequence derived from Murine monoclonal antibody and further modified by amino acid substitutions
SASSSVGYMH

SEQ ID NO: 15 - protein, 7 aa, Artificial Sequence
  Amino acid sequence derived from Murine monoclonal antibody and further modified by amino acid substitutions
DTFKLAS

SEQ ID NO: 16 - protein, 9 aa, Artificial Sequence
  Amino acid sequence derived from Murine monoclonal antibody and further modified by amino acid substitutions
FQFSGYPFT

SEQ ID NO: 17 - protein, 120 aa, Artificial Sequence
  Humanized antibody - VH Domain
QVTLRESGPALVKPTQTLTLTCTFSGFSLSTPGMSVGWIRQPPGKALEWLADIWWDDKKHYNPSLKDRLTISKDTSKNQVVLKVTNMDPADTATYYCARDMIFNFYFDVWGQGTTVTVSS

SEQ ID NO: 18 - protein, 7 aa, Artificial Sequence
  Amino acid sequence derived from Murine monoclonal antibody and further modified by amino acid substitutions
TPGMSVG

SEQ ID NO: 19 - protein, 16 aa, Artificial Sequence
  Amino acid sequence derived from Murine monoclonal antibody and further modified by amino acid substitutions
DIWWDDKKHYNPSLKD

SEQ ID NO: 20 - protein, 10 aa, Artificial Sequence
  Amino acid sequence derived from Murine monoclonal antibody and further modified by amino acid substitutions
DMIFNFYFDV

SEQ ID NO: 21 - protein, 106 aa, Artificial Sequence
  Humanized antibody - VL Domain
DIQMTQSPSTLSASVGDRVTITCSLSSRVGYMHWYQQKPGKAPKLLIYDTFYLSSGVPSRFSGSGSGTEFTLTISSLQPDDFATYYCFQGSGYPFTFGGGTKVEIK

SEQ ID NO: 22 - protein, 10 aa, Artificial Sequence
  Amino acid sequence derived from Murine monoclonal antibody and further modified by amino acid substitutions
SLSSRVGYMH

SEQ ID NO: 23 - protein, 7 aa, Artificial Sequence
  Amino acid sequence derived from Murine monoclonal antibody and further modified by amino acid substitutions
DTFYLSS

SEQ ID NO: 24 - protein, 120 aa, Artificial Sequence
  Humanized antibody - VH Domain
QVTLRESGPALVKPTQTLTLTCTFSGFSLSTPGMSVGWIRQPPGKALEWLADIWWDGKKHYNPSLKDRLTISKDTSKNQVVLKVTNMDPADTATYYCARDMIFNFYFDVWGQGTTVTVSS

SEQ ID NO: 25 - protein, 16 aa, Artificial Sequence
  Amino acid sequence derived from Murine monoclonal antibody and further modified by amino acid substitutions
DIWWDGKKHYNPSLKD

SEQ ID NO: 26 - protein, 106 aa, Artificial Sequence
  Humanized antibody - VL Domain
DIQMTQSPSTLSASVGDRVTITCSLSSRVGYMHWYQQKPGKAPKLLIYDTRGLPSGVPSRFSGSGSGTEFTLTISSLQPDDFATYYCFQGSGYPFTFGGGTKVEIK

SEQ ID NO: 27 - protein, 7 aa, Artificial Sequence
  Amino acid sequence derived from Murine monoclonal antibody and further modified by amino acid substitutions
DTRGLPS

SEQ ID NO: 28 - protein, 120 aa, Artificial Sequence
  Humanized antibody - VH Domain
QVTLRESGPALVKPTQTLTLTCTFSGFSLSTPGMSVGWIRQPPGKALEWLADIWWDGKKHYNPSLKDRLTISKDTSKNQVVLKVTNMDPADTATYYCARDMIFNWYFDVWGQGTTVTVSS

SEQ ID NO: 29 - protein, 10 aa, Artificial Sequence
  Amino acid sequence derived from Murine monoclonal antibody and further modified by amino acid substitutions
DMIFNWYFDV

SEQ ID NO: 30 - protein, 106 aa, Artificial Sequence
  Humanized antibody - VL Domain
DIQMTQSPSTLSASVGDRVTITCSPSSRVGYMHWYQQKPGKAPKLLIYDTMRLASGVPSRFSGSGSGTEFTLTISSLQPDDFATYYCFQGSGYPFTFGGGTKVEIK

SEQ ID NO: 31 - protein, 10 aa, Artificial Sequence
  Amino acid sequence derived from Murine monoclonal antibody and further modified by amino acid substitutions
SPSSRVGYMH

SEQ ID NO: 32 - protein, 7 aa, Artificial Sequence
  Amino acid sequence derived from Murine monoclonal antibody and further modified by amino acid substitutions
DTMRLAS

SEQ ID NO: 33 - protein, 120 aa, Artificial Sequence
  Humanized antibody - VH Domain
QVTLRESGPALVKPTQTLTLTCTFSGFSLSTAGMSVGWIRQPPGKALEWLADIWWDGKKHYNPSLKDRLTISKDTSKNQVVLKVTNMDPADTATYYCARDMIFNWYFDVWGQGTTVTVSS

SEQ ID NO: 34 - protein, 106 aa, Artificial Sequence
  Humanized antibody - VL Domain
DIQMTQSPSTLSASVGDRVTITCSLSSRVGYMHWYQQKPGKAPKLLIYDTFKLSSGVPSRFSGSGSGTEFTLTISSLQPDDFATYYCFQGSGYPFTFGGGTKVEIK

SEQ ID NO: 35 - protein, 7 aa, Artificial Sequence
  Amino acid sequence derived from Murine monoclonal antibody and further modified by amino acid substitutions
DTFKLSS

SEQ ID NO: 36 - protein, 120 aa, Artificial Sequence
  Humanized antibody - VH Domain
QVTLRESGPALVKPTQTLTLTCTFSGFSLSTAGMSVGWIRQPPGKALEWLADIWWDGKKDYNPSLKDRLTISKDTSKNQVVLKVTNMDPADTATYYCARDMIFNFYFDVWGQGTTVTVSS

SEQ ID NO: 37 - protein, 16 aa, Artificial Sequence
  Amino acid sequence derived from Murine monoclonal antibody and further modified by amino acid substitutions
DIWWDGKKDYNPSLKD

SEQ ID NO: 38 - protein, 106 aa, Artificial Sequence
  Humanized antibody - VL Domain
DIQMTQSPSTLSASVGDRVTITCSASSRVGYMHWYQQKPGKAPKLLIYDTFKLSSGVPSRFSGSGSGTEFTLTISSLQPDDFATYYCFQGSGYPFTFGGGTKVEIK

SEQ ID NO: 39 - protein, 10 aa, Artificial Sequence
  Amino acid sequence derived from Murine monoclonal antibody and further modified by amino acid substitutions
SASSRVGYMH

SEQ ID NO: 40 - protein, 120 aa, Artificial Sequence
  Humanized antibody - VH Domain
QVTLRESGPALVKPTQTLTLTCTFSGFSLSTAGMSVGWIRQPPGKALEWLADIWWDGKKSYNPSLKDRLTISKDTSKNQVVLKVTNMDPADTATYYCARDMIFNFYFDVWGQGTTVTVSS

SEQ ID NO: 41 - protein, 16 aa, Artificial Sequence
  Amino acid sequence derived from Murine monoclonal antibody and further modified by amino acid substitutions
DIWWDGKKSYNPSLKD

SEQ ID NO: 42 - protein, 106 aa, Artificial Sequence
  Humanized antibody - VL Domain
DIQMTQSPSTLSASVGDRVTITCSLSSRVGYMHWYQQKPGKAPKLLIYDTMYQSSGVPSRFSGSGSGTEFTLTISSLQPDDFATYYCFQGSGYPFTFGGGTKVEIK

SEQ ID NO: 43 - protein, 7 aa, Artificial Sequence
  Amino acid sequence derived from Murine monoclonal antibody and further modified by amino acid substitutions
DTMYQSS

SEQ ID NO: 44 - protein, 120 aa, Artificial Sequence
  Humanized antibody - VH Domain
QVTLRESGPALVKPTQTLTLTCTFSGFSLSTAGMSVGWIRQPPGKALEWLADIWWDDKKSYNPSLKDRLTISKDTSKNQVVLKVTNMDPADTATYYCARDMIFNFYFDVWGQGTTVTVSS

SEQ ID NO: 45 - protein, 16 aa, Artificial Sequence
  Amino acid sequence derived from Murine monoclonal antibody and further modified by amino acid substitutions
DIWWDDKKSYNPSLKD

SEQ ID NO: 46 - protein, 106 aa, Artificial Sequence
  Humanized antibody - VL Domain
DIQMTQSPSTLSASVGDRVTITCLPSSRVGYMHWYQQKPGKAPKLLIYDTMYQSSGVPSRFSGSGSGTEFTLTISSLQPDDFATYYCFQGSGYPFTFGGGTKVEIK

SEQ ID NO: 47 - protein, 10 aa, Artificial Sequence
  Amino acid sequence derived from Murine monoclonal antibody and further modified by amino acid substitutions
LPSSRVGYMH

SEQ ID NO: 48 - protein, 120 aa, Artificial Sequence [sequence omitted]

SEQ ID NO: 49 - protein, 106 aa, Artificial Sequence
  Humanized antibody - VL Domain
DIQMTQSPSTLSASVGDRVTITCSASSRVGYMHWYQQKPGKAPKLLIYDTFFLDSGVPSRFSGSGSGTEFTLTISSLQPDDFATYYCFQGSGYPFTFGGGTKVEIK

SEQ ID NO: 50 - protein, 7 aa, Artificial Sequence
  Amino acid sequence derived from Murine monoclonal antibody and further modified by amino acid substitutions
DTFFLDS

SEQ ID NO: 51 - protein, 120 aa, Artificial Sequence
  Humanized antibody - VH Domain
QVTLRESGPALVKPTQTLTLTCTFSGFSLSTAGMSVGWIRQPPGKALEWLADIWWDDKKSYNPSLKDRLTISKDTSKNQVVLKVTNMDPADTATYYCARDMIFNWYFDVWGQGTTVTVSS

SEQ ID NO: 52 - protein, 106 aa, Artificial Sequence
  Humanized antibody - VL Domain
DIQMTQSPSTLSASVGDRVTITCSPSSRVGYMHWYQQKPGKAPKLLIYDTRYQSSGVPSRFSGSGSGTEFTLTISSLQPDDFATYYCFQGSGYPFTFGGGTKVEIK

SEQ ID NO: 53 - protein, 7 aa, Artificial Sequence
  Amino acid sequence derived from Murine monoclonal antibody and further modified by amino acid substitutions
DTRYQSS

SEQ ID NO: 54 - protein, 106 aa, Artificial Sequence
  Humanized antibody - VL Domain
DIQMTQSPSTLSASVGDRVTITCSASSSVGYMHWYQQKPGKAPKLLIYDTSKLASGVPSRFSGSGSGTEFTLTISSLQPDDFATYYCFQGSGYPFTFGGGTKVEIK

SEQ ID NO: 55 - protein, 120 aa, Artificial Sequence
  Humanized antibody - VH Domain
QVTLRESGPALVKPTQTLTLTCTFSGFSLSTAGMSVGWIRQPPGKALEWLADIWWDDKKDYNPSLKSRLTISKDTSKNQVVLKVTNMDPADTATYYCARDMIFNWYFDVWGQGTTVTVSS

SEQ ID NO: 56 - protein, 106 aa, Artificial Sequence
  Humanized antibody - VL Domain
DIQMTQSPSTLSASVGDRVTITCSASSSVGYMHWYQQKPGKAPKLLIYDTFKLASGVPSRFSGSGSGTEFTLTISSLQPDDFATYYCFQGSGYPFTFGGGTKVEIK

SEQ ID NO: 57 - protein, 7 aa, Artificial Sequence
  Amino acid sequence derived from Murine monoclonal antibody and further modified by amino acid substitutions
DTYKQTS

SEQ ID NO: 58 - protein, 106 aa, Artificial Sequence
  Humanized antibody - VL Domain
DIQMTQSPSTLSASVGDRVTITCSASSSVGYMHWYQQKPGKAPKLLIYDTRYLSSGVPSRFSGSGSGTEFTLTISSLQPDDFATYYCFQGSGYPFTFGGGTKVEIK

SEQ ID NO: 59 - protein, 7 aa, Artificial Sequence
  Amino acid sequence derived from Murine monoclonal antibody and further modified by amino acid substitutions
DTRYLSS

SEQ ID NO: 60 - protein, 106 aa, Artificial Sequence
  Humanized antibody - VL Domain
DIQMTQSPSTLSASVGDRVTITCSASSSVGYMHWYQQKPGKAPKLLIYDTFKLASGVPSRFSGSGSGTEFTLTISSLQPDDFATYYCFQGSFYPFTFGGGTKVEIK

SEQ ID NO: 61 - protein, 9 aa, Artificial Sequence
  Amino acid sequence derived from Murine monoclonal antibody and further modified by amino acid substitutions
FQGSFYPFT

SEQ ID NO: 62 - protein, 106 aa, Artificial Sequence
  Humanized antibody - VL Domain
DIQMTQSPSTLSASVGDRVTITCSASSSVGYMHWYQQKPGKAPKLLIYDTFKLTSGVPSRFSGSGSGTEFTLTISSLQPDDFATYYCFQGSGYPFTFGGGTKVEIK

SEQ ID NO: 63 - protein, 7 aa, Artificial Sequence
  Amino acid sequence derived from Murine monoclonal antibody and further modified by amino acid substitutions
DTFKLTS

SEQ ID NO: 64 - protein, 106 aa, Artificial Sequence
  Humanized antibody - VL Domain
DIQMTQSPSTLSASVGDRVTITCSASSRVGYMHWYQQKPGKAPKLLIYDTFKLASGVPSRFSGSGSGTEFTLTISSLQPDDFATYYCFQGSGYPFTFGGGTKVEIK

SEQ ID NO: 65 - protein, 106 aa, Artificial Sequence
  Humanized antibody - VL Domain
DIQMTQSPSTLSASVGDRVTITCSASSSVGYMHWYQQKPGKAPKLLIYDTFRLASGVPSRFSGSGSGTEFTLTISSLQPDDFATYYCFQGSGYPFTFGGGTKVEIK

SEQ ID NO: 66 - protein, 7 aa, Artificial Sequence
  Amino acid sequence derived from Murine monoclonal antibody and further modified by amino acid substitutions
DTFRLAS

SEQ ID NO: 67 - protein, 120 aa, Artificial Sequence
  Humanized antibody - VH Domain
QVTLRESGPALVKPTQTLTLTCTFSGFSLSTAGMSVGWIRQPPGKALEWLADIWWDDKKHYNPSLKDRLTISKDTSKNQVVLKVTNMDPADTATYYCARDMIFNWYFDVWGQGTTVTVSS

SEQ ID NO: 68 - protein, 106 aa, Artificial Sequence
  Humanized antibody - VL Domain
DIQMTQSPSTLSASVGDRVTITCSPSSRVGYMHWYQQKPGKAPKLLIYDTYRHSSGVPSRFSGSGSGTEFTLTISSLQPDDFATYYCFQGSGYPFTFGGGTKVEIK

SEQ ID NO: 69 - protein, 7 aa, Artificial Sequence
  Amino acid sequence derived from Murine monoclonal antibody and further modified by amino acid substitutions
DTYRHSS

SEQ ID NO: 70 - protein, 106 aa, Artificial Sequence
  Humanized antibody - VL Domain
DIQMTQSPSTLSASVGDRVTITCSASSSVGYMHWYQQKPGKAPKLLIYDTYKQTSGVPSRFSGSGSGTEFTLTISSLQPDDFATYYCFQGSGYPFTFGGGTKVEIK

SEQ ID NO: 71 - protein, 106 aa, Artificial Sequence
  Humanized antibody - VL Domain
DIQMTQSPSTLSASVGDRVTITCSLSSSVGYMHWYQQKPGKAPKLLIYDTFFHRSGVPSRFSGSGSGTEFTLTISSLQPDDFATYYCFQGSGYPFTFGGGTKVEIK

SEQ ID NO: 72 - protein, 10 aa, Artificial Sequence
  Amino acid sequence derived from Murine monoclonal antibody and further modified by amino acid substitutions
SLSSSVGYMH

SEQ ID NO: 73 - protein, 7 aa, Artificial Sequence
  Amino acid sequence derived from Murine monoclonal antibody and further modified by amino acid substitutions
DTFFHRS

SEQ ID NO: 74 - protein, 106 aa, Artificial Sequence
  Humanized antibody - VL Domain
DIQMTQSPSTLSASVGDRVTITCSASSRVGYMHWYQQKPGKAPKLLIYDTLLLDSGVPSRFSGSGSGTEFTLTISSLQPDDFATYYCFQGSGYPFTFGGGTKVEIK

SEQ ID NO: 75 - protein, 7 aa, Artificial Sequence
  Amino acid sequence derived from Murine monoclonal antibody and further modified by amino acid substitutions
DTLLLDS

SEQ ID NO: 76 - protein, 106 aa, Artificial Sequence
  Humanized antibody - VL Domain
DIQMTQSPSTLSASVGDRVTITCSASSRVGYMHWYQQKPGKAPKLLIYDTSFLDSGVPSRFSGSGSGTEFTLTISSLQPDDFATYYCFQGSGYPFTFGGGTKVEIK

SEQ ID NO: 77 - protein, 7 aa, Artificial Sequence
  Amino acid sequence derived from Murine monoclonal antibody and further modified by amino acid substitutions
DTSFLDS

SEQ ID NO: 78 - protein, 120 aa, Artificial Sequence
  Humanized antibody - VH Domain
QVTLRESGPALVKPTQTLTLTCTFSGFSLSTAGMSVGWIRQPPGKALEWLADIWWDDKKDYNPSLKSRLTISKDTSKNQVVLKVTNMDPADTATYYCARDMITNFYFDVWGQGTTVTVSS

SEQ ID NO: 79 - protein, 10 aa, Artificial Sequence
  Amino acid sequence derived from Murine monoclonal antibody and further modified by amino acid substitutions
DMITNFYFDV

SEQ ID NO: 80 - protein, 10 aa, Artificial Sequence
  Amino acid sequence derived from Murine monoclonal antibody and further modified by amino acid substitutions
KCQSSVGYMH

SEQ ID NO: 81 - protein, 7 aa, Artificial Sequence
  Amino acid sequence derived from Murine monoclonal antibody and further modified by amino acid substitutions
DTSYLAS

SEQ ID NO: 82 - protein, 16 aa, Artificial Sequence
  Amino acid sequence derived from Murine monoclonal antibody and further modified by amino acid substitutions
DIWWDDKKHYNPSLKS

SEQ ID NO: 83 - protein, 10 aa, Artificial Sequence
  Amino acid sequence derived from Murine monoclonal antibody and further modified by amino acid substitutions
DMITNWYFDV

SEQ ID NO: 84 - protein, 10 aa, Artificial Sequence
  Amino acid sequence derived from Murine monoclonal antibody and further modified by amino acid substitutions
KCQSRVGYMH

SEQ ID NO: 85 - protein, 7 aa, Artificial Sequence
  Amino acid sequence derived from Murine monoclonal antibody and further modified by amino acid substitutions
DTSYLSS

SEQ ID NO: 86 - protein, 16 aa, Artificial Sequence
  Amino acid sequence derived from Murine monoclonal antibody and further modified by amino acid substitutions
DIWWDDKKDYNPSLKD

SEQ ID NO: 87 - protein, 10 aa, Artificial Sequence
  Amino acid sequence derived from Murine monoclonal antibody and further modified by amino acid substitutions
KCQLRVGYMH

SEQ ID NO: 88 - protein, 7 aa, Artificial Sequence
  Amino acid sequence derived from Murine monoclonal antibody and further modified by amino acid substitutions
DTKKLSS

SEQ ID NO: 89 - protein, 10 aa, Artificial Sequence
  Amino acid sequence derived from Murine monoclonal antibody and further modified by amino acid substitutions
KLQLSVGYMH

SEQ ID NO: 90 - protein, 7 aa, Artificial Sequence
  Amino acid sequence derived from Murine monoclonal antibody and further modified by amino acid substitutions
DTFYLSS

SEQ ID NO: 91 - protein, 16 aa, Artificial Sequence
  Amino acid sequence derived from Murine monoclonal antibody and further modified by amino acid substitutions
DIWWDDKKHYNPSLKS

SEQ ID NO: 92 - protein, 10 aa, Artificial Sequence
  Amino acid sequence derived from Murine monoclonal antibody and further modified by amino acid substitutions
KLQSSVGYMH

SEQ ID NO: 93 - protein, 16 aa, Artificial Sequence
  Amino acid sequence derived from Murine monoclonal antibody and further modified by amino acid substitutions
DIWWDDKKHYNPSLKS

SEQ ID NO: 94 - protein, 10 aa, Artificial Sequence
  Amino acid sequence derived from Murine monoclonal antibody and further modified by amino acid substitutions
SMIFNWYFDV

SEQ ID NO: 95 - protein, 10 aa, Artificial Sequence
  Amino acid sequence derived from Murine monoclonal antibody and further modified by amino acid substitutions
KLQSRVGYMH

SEQ ID NO: 96 - protein, 7 aa, Artificial Sequence
  Amino acid sequence derived from Murine monoclonal antibody and further modified by amino acid substitutions
DTFKLSS

SEQ ID NO: 97 - protein, 10 aa, Artificial Sequence
  Amino acid sequence derived from Murine monoclonal antibody and further modified by amino acid substitutions
SMIFNFYFDV

SEQ ID NO: 98 - protein, 10 aa, Artificial Sequence
  Amino acid sequence derived from Murine monoclonal antibody and further modified by amino acid substitutions
KLQLRVGYMH

SEQ ID NO: 99 - protein, 7 aa, Artificial Sequence
  Amino acid sequence derived from Murine monoclonal antibody and further modified by amino acid substitutions
DTFYLAS

SEQ ID NO: 100 - protein, 16 aa, Artificial Sequence
  Amino acid sequence derived from Murine monoclonal antibody and further modified by amino acid substitutions
DIWWDGKKDYNPSLKS

SEQ ID NO: 101 - protein, 10 aa, Artificial Sequence
  Amino acid sequence derived from Murine monoclonal antibody and further modified by amino acid substitutions
KLSLSVGYMH

SEQ ID NO: 102 - protein, 7 aa, Artificial Sequence
  Amino acid sequence derived from Murine monoclonal antibody and further modified by amino acid substitutions
DTSKLPS

SEQ ID NO: 103 - protein, 16 aa, Artificial Sequence
  Amino acid sequence derived from Murine monoclonal antibody and further modified by amino acid substitutions
DIWWDGKKDYNPSLKD

SEQ ID NO: 104 - protein, 10 aa, Artificial Sequence
  Amino acid sequence derived from Murine monoclonal antibody and further modified by amino acid substitutions
KLSSSVGYMH

SEQ ID NO: 105 - protein, 7 aa, Artificial Sequence
  Amino acid sequence derived from Murine monoclonal antibody and further modified by amino acid substitutions
DTSGLAS

SEQ ID NO: 106 - protein, 16 aa, Artificial Sequence
  Amino acid sequence derived from Murine monoclonal antibody and further modified by amino acid substitutions
DIWWDGKKHYNPSLKS

SEQ ID NO: 107 - protein, 10 aa, Artificial Sequence
  Amino acid sequence derived from Murine monoclonal antibody and further modified by amino acid substitutions
KLSSRVGYMH

SEQ ID NO: 108 - protein, 7 aa, Artificial Sequence
  Amino acid sequence derived from Murine monoclonal antibody and further modified by amino acid substitutions
DTSGLPS

SEQ ID NO: 109 - protein, 16 aa, Artificial Sequence
  Amino acid sequence derived from Murine monoclonal antibody and further modified by amino acid substitutions
DIWWDDKKSYNPSLKS

SEQ ID NO: 110 - protein, 10 aa, Artificial Sequence
  Amino acid sequence derived from Murine monoclonal antibody and further modified by amino acid substitutions
KLSLRVGYMH

SEQ ID NO: 111 - protein, 16 aa, Artificial Sequence
  Amino acid sequence derived from Murine monoclonal antibody and further modified by amino acid substitutions
DIWWDDKKSYNPSLKD

SEQ ID NO: 112 - protein, 10 aa, Artificial Sequence
  Amino acid sequence derived from Murine monoclonal antibody and further modified by amino acid substitutions
KCSLSVGYMH

SEQ ID NO: 113 - protein, 7 aa, Artificial Sequence
  Amino acid sequence derived from Murine monoclonal antibody and further modified by amino acid substitutions
DTRKLAS

SEQ ID NO: 114 - protein, 16 aa, Artificial Sequence
  Amino acid sequence derived from Murine monoclonal antibody and further modified by amino acid substitutions
DIWWDGKKSYNPSLKS

SEQ ID NO: 115 - protein, 10 aa, Artificial Sequence
  Amino acid sequence derived from Murine monoclonal antibody and further modified by amino acid substitutions
KCSSSVGYMH

SEQ ID NO: 116 - protein, 7 aa, Artificial Sequence
  Amino acid sequence derived from Murine monoclonal antibody and further modified by amino acid substitutions
DTRGLAS

SEQ ID NO: 117 - protein, 10 aa, Artificial Sequence
  Amino acid sequence derived from Murine monoclonal antibody and further modified by amino acid substitutions
KCSSRVGYMH

SEQ ID NO: 118 - protein, 7 aa, Artificial Sequence
  Amino acid sequence derived from Murine monoclonal antibody and further modified by amino acid substitutions
DTRKLPS

SEQ ID NO: 119 - protein, 10 aa, Artificial Sequence
  Amino acid sequence derived from Murine monoclonal antibody and further modified by amino acid substitutions
KCSLRVGYMH

SEQ ID NO: 120 - protein, 10 aa, Artificial Sequence
  Amino acid sequence derived from Murine monoclonal antibody and further modified by amino acid substitutions
SLSLSVGYMH

SEQ ID NO: 121 - protein, 7 aa, Artificial Sequence
  Amino acid sequence derived from Murine monoclonal antibody and further modified by amino acid substitutions
DTMKLAS

SEQ ID NO: 122 - protein, 10 aa, Artificial Sequence
  Amino acid sequence derived from Murine monoclonal antibody and further modified by amino acid substitutions
SLSSSVGYMH

SEQ ID NO: 123 - protein, 7 aa, Artificial Sequence
  Amino acid sequence derived from Murine monoclonal antibody and further modified by amino acid substitutions
DTSRLAS

SEQ ID NO: 124 - protein, 7 aa, Artificial Sequence
  Amino acid sequence derived from Murine monoclonal antibody and further modified by amino acid substitutions
DTSLLAS

SEQ ID NO: 125 - protein, 10 aa, Artificial Sequence
  Amino acid sequence derived from Murine monoclonal antibody and further modified by amino acid substitutions
SLSLRVGYMH

SEQ ID NO: 126 - protein, 7 aa, Artificial Sequence
  Amino acid sequence derived from Murine monoclonal antibody and further modified by amino acid substitutions
DTSLLDS

SEQ ID NO: 127 - protein, 10 aa, Artificial Sequence
  Amino acid sequence derived from Murine monoclonal antibody and further modified by amino acid substitutions
SCQLSVGYMH

SEQ ID NO: 128 - protein, 7 aa, Artificial Sequence
  Amino acid sequence derived from Murine monoclonal antibody and further modified by amino acid substitutions
DTSKLDS

SEQ ID NO: 129 - protein, 10 aa, Artificial Sequence
  Amino acid sequence derived from Murine monoclonal antibody and further modified by amino acid substitutions
SCQSSVGYMH

SEQ ID NO: 130 - protein, 10 aa, Artificial Sequence
  Amino acid sequence derived from Murine monoclonal antibody and further modified by amino acid substitutions
SCQSRVGYMH

SEQ ID NO: 131 - protein, 7 aa, Artificial Sequence
  Amino acid sequence derived from Murine monoclonal antibody and further modified by amino acid substitutions
DTLKLDS

SEQ ID NO: 132 - protein, 10 aa, Artificial Sequence
  Amino acid sequence derived from Murine monoclonal antibody and further modified by amino acid substitutions
SCQLRVGYMH

SEQ ID NO: 133 - protein, 7 aa, Artificial Sequence
  Amino acid sequence derived from Murine monoclonal antibody and further modified by amino acid substitutions
DTLLLAS

SEQ ID NO: 134 - protein, 10 aa, Artificial Sequence
  Amino acid sequence derived from Murine monoclonal antibody and further modified by amino acid substitutions
SLQLSVGYMH

SEQ ID NO: 135 - protein, 7 aa, Artificial Sequence
  Amino acid sequence derived from Murine monoclonal antibody and further modified by amino acid substitutions
DTLKLAS

SEQ ID NO: 136 - protein, 10 aa, Artificial Sequence
  Amino acid sequence derived from Murine monoclonal antibody and further modified by amino acid substitutions
SLQSSVGYMH

SEQ ID NO: 137 - protein, 7 aa, Artificial Sequence
  Amino acid sequence derived from Murine monoclonal antibody and further modified by amino acid substitutions
DTSKLSS

SEQ ID NO: 138 - protein, 10 aa, Artificial Sequence
  Amino acid sequence derived from Murine monoclonal antibody and further modified by amino acid substitutions
SLQSRVGYMH

SEQ ID NO: 139 - protein, 7 aa, Artificial Sequence
  Amino acid sequence derived from Murine monoclonal antibody and further modified by amino acid substitutions
DTSKQAS

SEQ ID NO: 140 - protein, 10 aa, Artificial Sequence
  Amino acid sequence derived from Murine monoclonal antibody and further modified by amino acid substitutions
SLQLRVGYMH

SEQ ID NO: 141 - protein, 7 aa, Artificial Sequence
  Amino acid sequence derived from Murine monoclonal antibody and further modified by amino acid substitutions
DTSKQSS

SEQ ID NO: 142 - protein, 10 aa, Artificial Sequence
  Amino acid sequence derived from Murine monoclonal antibody and further modified by amino acid substitutions
SCSLSVGYMH

SEQ ID NO: 143 - protein, 7 aa, Artificial Sequence
  Amino acid sequence derived from Murine monoclonal antibody and further modified by amino acid substitutions
DTSYLAS

SEQ ID NO: 144 - protein, 10 aa, Artificial Sequence
  Amino acid sequence derived from Murine monoclonal antibody and further modified by amino acid substitutions
SCSSSVGYMH

SEQ ID NO: 145 - protein, 7 aa, Artificial Sequence
  Amino acid sequence derived from Murine monoclonal antibody and further modified by amino acid substitutions
DTSYLSS

SEQ ID NO: 146 - protein, 10 aa, Artificial Sequence
  Amino acid sequence derived from Murine monoclonal antibody and further modified by amino acid substitutions
SCSSRVGYMH

SEQ ID NO: 147 - protein, 7 aa, Artificial Sequence
  Amino acid sequence derived from Murine monoclonal antibody and further modified by amino acid substitutions
DTSYQAS

SEQ ID NO: 148 - protein, 10 aa, Artificial Sequence
  Amino acid sequence derived from Murine monoclonal antibody and further modified by amino acid substitutions
SCSLRVGYMH

SEQ ID NO: 149 - protein, 7 aa, Artificial Sequence
  Amino acid sequence derived from Murine monoclonal antibody and further modified by amino acid substitutions
DTSYQSS

SEQ ID NO: 150 - protein, 10 aa, Artificial Sequence
  Amino acid sequence derived from Murine monoclonal antibody and further modified by amino acid substitutions
KPSSRVGYMH

SEQ ID NO: 151 - protein, 7 aa, Artificial Sequence
  Amino acid sequence derived from Murine monoclonal antibody and further modified by amino acid substitutions
DTMYQAS

SEQ ID NO: 152 - protein, 10 aa, Artificial Sequence
  Amino acid sequence derived from Murine monoclonal antibody and further modified by amino acid substitutions
KPSLRVGYMH

SEQ ID NO: 153 - protein, 10 aa, Artificial Sequence
  Amino acid sequence derived from Murine monoclonal antibody and further modified by amino acid substitutions
KPSSSVGYMH

SEQ ID NO: 154 - protein, 7 aa, Artificial Sequence
  Amino acid sequence derived from Murine monoclonal antibody and further modified by amino acid substitutions
DTMKQAS

SEQ ID NO: 155 - protein, 10 aa, Artificial Sequence
  Amino acid sequence derived from Murine monoclonal antibody and further modified by amino acid substitutions
KPSLSVGYMH

SEQ ID NO: 156 - protein, 7 aa, Artificial Sequence
  Amino acid sequence derived from Murine monoclonal antibody and further modified by amino acid substitutions
DTMKQSS

SEQ ID NO: 157 - protein, 10 aa, Artificial Sequence
  Amino acid sequence derived from Murine monoclonal antibody and further modified by amino acid substitutions
KPQSRVGYMH

SEQ ID NO: 158 - protein, 7 aa, Artificial Sequence
  Amino acid sequence derived from Murine monoclonal antibody and further modified by amino acid substitutions
DTMYLAS

SEQ ID NO: 159 - protein, 10 aa, Artificial Sequence
  Amino acid sequence derived from Murine monoclonal antibody and further modified by amino acid substitutions
KPQLRVGYMH

SEQ ID NO: 160 - protein, 7 aa, Artificial Sequence
  Amino acid sequence derived from Murine monoclonal antibody and further modified by amino acid substitutions
DTMYLSS

SEQ ID NO: 161 - protein, 10 aa, Artificial Sequence
  Amino acid sequence derived from Murine monoclonal antibody and further modified by amino acid substitutions
KPQSSVGYMH

SEQ ID NO: 162 - protein, 7 aa, Artificial Sequence
  Amino acid sequence derived from Murine monoclonal antibody and further modified by amino acid substitutions
DTMKLAS

SEQ ID NO: 163 - protein, 10 aa, Artificial Sequence
  Amino acid sequence derived from Murine monoclonal antibody and further modified by amino acid substitutions
KPQLSVGYMH

SEQ ID NO: 164 - protein, 7 aa, Artificial Sequence
  Amino acid sequence derived from Murine monoclonal antibody and further modified by amino acid substitutions
DTMKLSS

SEQ ID NO: 165 - protein, 7 aa, Artificial Sequence
  Amino acid sequence derived from Murine monoclonal antibody and further modified by amino acid substitutions
DTSKLSS

SEQ ID NO: 166 - protein, 10 aa, Artificial Sequence
  Amino acid sequence derived from Murine monoclonal antibody and further modified by amino acid substitutions
SPSLRVGYMH

SEQ ID NO: 167 - protein, 7 aa, Artificial Sequence
  Amino acid sequence derived from Murine monoclonal antibody and further modified by amino acid substitutions
DTRYQAS

SEQ ID NO: 168 - protein, 10 aa, Artificial Sequence
  Amino acid sequence derived from Murine monoclonal antibody and further modified by amino acid substitutions
SPSSSVGYMH

SEQ ID NO: 169 - protein, 10 aa, Artificial Sequence
  Amino acid sequence derived from Murine monoclonal antibody and further modified by amino acid substitutions
SPSLSVGYMH

SEQ ID NO: 170 - protein, 7 aa, Artificial Sequence
  Amino acid sequence derived from Murine monoclonal antibody and further modified by amino acid substitutions
DTRYQAS

SEQ ID NO: 171 - protein, 10 aa, Artificial Sequence
  Amino acid sequence derived from Murine monoclonal antibody and further modified by amino acid substitutions
SPQSRVGYMH

SEQ ID NO: 172 - protein, 7 aa, Artificial Sequence
  Amino acid sequence derived from Murine monoclonal antibody and further modified by amino acid substitutions
DTRKQSS

SEQ ID NO: 173 - protein, 10 aa, Artificial Sequence
  Amino acid sequence derived from Murine monoclonal antibody and further modified by amino acid substitutions
SPQLRVGYMH

SEQ ID NO: 174 - protein, 7 aa, Artificial Sequence
  Amino acid sequence derived from Murine monoclonal antibody and further modified by amino acid substitutions
DTRKLAS

SEQ ID NO: 175 - protein, 7 aa, Artificial Sequence
  Amino acid sequence derived from Murine monoclonal antibody and further modified by amino acid substitutions
DTRKLSS

SEQ ID NO: 176 - protein, 10 aa, Artificial Sequence
  Amino acid sequence derived from Murine monoclonal antibody and further modified by amino acid substitutions
SPQSSVGYMH

SEQ ID NO: 177 - protein, 10 aa, Artificial Sequence
  Amino acid sequence derived from Murine monoclonal antibody and further modified by amino acid substitutions
SPQLSVGYMH

SEQ ID NO: 178 - protein, 7 aa, Artificial Sequence
  Amino acid sequence derived from Murine monoclonal antibody and further modified by amino acid substitutions
DTRYLAS

SEQ ID NO: 179 - protein, 10 aa, Artificial Sequence
  Amino acid sequence derived from Murine monoclonal antibody and further modified by amino acid substitutions
KAQSRVGYMH

SEQ ID NO: 180 - protein, 10 aa, Artificial Sequence
  Amino acid sequence derived from Murine monoclonal antibody and further modified by amino acid substitutions
KAQLRVGYMH

SEQ ID NO: 181 - protein, 10 aa, Artificial Sequence
  Amino acid sequence derived from Murine monoclonal antibody and further modified by amino acid substitutions
KAQSSVGYMH

SEQ ID NO: 182 - protein, 10 aa, Artificial Sequence
  Amino acid sequence derived from Murine monoclonal antibody and further modified by amino acid substitutions
KAQLSVGYMH

SEQ ID NO: 183 - protein, 10 aa, Artificial Sequence
  Amino acid sequence derived from Murine monoclonal antibody and further modified by amino acid substitutions
KASSRVGYMH

SEQ ID NO: 184 - protein, 10 aa, Artificial Sequence
  Amino acid sequence derived from Murine monoclonal antibody and further modified by amino acid substitutions
KASLRVGYMH

SEQ ID NO: 185 - protein, 10 aa, Artificial Sequence
  Amino acid sequence derived from Murine monoclonal antibody and further modified by amino acid substitutions
KASSSVGYMH

SEQ ID NO: 186 - protein, 10 aa, Artificial Sequence
  Amino acid sequence derived from Murine monoclonal antibody and further modified by amino acid substitutions
KASLSVGYMH

SEQ ID NO: 187 - protein, 10 aa, Artificial Sequence
  Amino acid sequence derived from Murine monoclonal antibody and further modified by amino acid substitutions
SASLRVGYMH

SEQ ID NO: 188 - protein, 10 aa, Artificial Sequence
  Amino acid sequence derived from Murine monoclonal antibody and further modified by amino acid substitutions
SASLSVGYMH

SEQ ID NO: 189 - protein, 10 aa, Artificial Sequence
  Amino acid sequence derived from Murine monoclonal antibody and further modified by amino acid substitutions
SAQSRVGYMH

SEQ ID NO: 190 - protein, 10 aa, Artificial Sequence
  Amino acid sequence derived from Murine monoclonal antibody and further modified by amino acid substitutions
SAQLRVGYMH

SEQ ID NO: 191 - protein, 10 aa, Artificial Sequence
  Amino acid sequence derived from Murine monoclonal antibody and further modified by amino acid substitutions
SAQSSVGYMH

SEQ ID NO: 192 - protein, 10 aa, Artificial Sequence
  Amino acid sequence derived from Murine monoclonal antibody and further modified by amino acid substitutions
LPSLSVGYMH

SEQ ID NO: 193 - protein, 10 aa, Artificial Sequence
  Amino acid sequence derived from Murine monoclonal antibody and further modified by amino acid substitutions
LPSSSVGYMH

SEQ ID NO: 194 - protein, 10 aa, Artificial Sequence
  Amino acid sequence derived from Murine monoclonal antibody and further modified by amino acid substitutions
LPSLRVGYMH

SEQ ID NO: 195 - protein, 10 aa, Artificial Sequence
  Amino acid sequence derived from Murine monoclonal antibody and further modified by amino acid substitutions
LCSSRVGYMH

SEQ ID NO: 196 - protein, 10 aa, Artificial Sequence
  Amino acid sequence derived from Murine monoclonal antibody and further modified by amino acid substitutions
LCSLSVGYMH

SEQ ID NO: 197 - protein, 10 aa, Artificial Sequence
  Amino acid sequence derived from Murine monoclonal antibody and further modified by amino acid substitutions
LCSSSVGYMH

SEQ ID NO: 198 - protein, 10 aa, Artificial Sequence
  Amino acid sequence derived from Murine monoclonal antibody and further modified by amino acid substitutions
LCSLRVGYMH

SEQ ID NO: 199 - protein, 10 aa, Artificial Sequence
  Amino acid sequence derived from Murine monoclonal antibody and further modified by amino acid substitutions
LPQSRVGYMH

SEQ ID NO: 200 - protein, 10 aa, Artificial Sequence
  Amino acid sequence derived from Murine monoclonal antibody and further modified by amino acid substitutions
LPQLSVGYMH

SEQ ID NO: 201 - protein, 10 aa, Artificial Sequence
  Amino acid sequence derived from Murine monoclonal antibody and further modified by amino acid substitutions
LPQSSVGYMH

SEQ ID NO: 202 - protein, 10 aa, Artificial Sequence
  Amino acid sequence derived from Murine monoclonal antibody and further modified by amino acid substitutions
LPQLRVGYMH

SEQ ID NO: 203 - protein, 10 aa, Artificial Sequence
  Amino acid sequence derived from Murine monoclonal antibody and further modified by amino acid substitutions
LCQSRVGYMH

SEQ ID NO: 204 - protein, 10 aa, Artificial Sequence
  Amino acid sequence derived from Murine monoclonal antibody and further modified by amino acid substitutions
LCQLSVGYMH

SEQ ID NO: 205 - protein, 10 aa, Artificial Sequence
  Amino acid sequence derived from Murine monoclonal antibody and further modified by amino acid substitutions
LCQSSVGYMH

SEQ ID NO: 206 - protein, 10 aa, Artificial Sequence
  Amino acid sequence derived from Murine monoclonal antibody and further modified by amino acid substitutions
LCQLRVGYMH

SEQ ID NO: 207 - protein, 10 aa, Artificial Sequence
  Amino acid sequence derived from Murine monoclonal antibody and further modified by amino acid substitutions
SAQLSVGYMH

SEQ ID NO: 208 - protein, 450 aa, Artificial Sequence
  Humanized antibody - VH Chain
QVTLRESGPALVKPTQTLTLTCTFSGFSLSTSGMSVGWIRQPPGKALEWLADIWWDDKKDYNPSLKSRLTISKDTSKNQVVLKVTNMDPADTATYYCARSMITNWYFDVWGAGTTVTVSSASTKGPSVFPLAPSSKSTSGGTAALGCLVKDYFPEPVTVSWNSGALTSGVHTFPAVLQSSGLYSLSSVVTVPSSSLGTQTYICNVNHKPSNTKVDKRVEPKSCDKTHTCPPCPAPELLGGPSVFLFPPKPKDTLMISRTPEVTCVVVDVSHEDPEVKFNWYVDGVEVHNAKTKPREEQYNSTYRVVSVLTVLHQDWLNGKEYKCKVSNKALPAPIEKTISKAKGQPREPQVYTLPPSREEMTKNQVSLTCLVKGFYPSDIAVEWESNGQPENNYKTTPPVLDSDGSFFLYSKLTVDKSRWQQGNVFSCSVMHEALHNHYTQKSLSLSPGK

SEQ ID NO: 209 - protein, 213 aa, Artificial Sequence
  Humanized antibody - VL Chain
DIQMTQSPSTLSASVGDRVTITCKCQLSVGYMHWYQQKPGKAPKLLIYDTSKLASGVPSRFSGSGSGTEFTLTISSLQPDDFATYYCFQGSGYPFTFGGGTKLEIKRTVAAPSVFIFPPSDEQLKSGTASVVCLLNNFYPREAKVQWKVDNALQSGNSQESVTEQDSKDSTYSLSSTLTLSKADYEKHKVYACEVTHQGLSSPVTKSFNRGEC

SEQ ID NO: 210 - protein, 450 aa, Artificial Sequence
  Humanized antibody - VH Chain
QVTLRESGPALVKPTQTLTLTCTFSGFSLSTAGMSVGWIRQPPGKALEWLADIWWDDKKDYNPSLKSRLTISKDTSKNQVVLKVTNMDPADTATYYCARSMITNFYFDVWGQGTTVTVSSASTKGPSVFPLAPSSKSTSGGTAALGCLVKDYFPEPVTVSWNSGALTSGVHTFPAVLQSSGLYSLSSVVTVPSSSLGTQTYICNVNHKPSNTKVDKRVEPKSCDKTHTCPPCPAPELLGGPSVFLFPPKPKDTLMISRTPEVTCVVVDVSHEDPEVKFNWYVDGVEVHNAKTKPREEQYNSTYRVVSVLTVLHQDWLNGKEYKCKVSNKALPAPIEKTISKAKGQPREPQVYTLPPSREEMTKNQVSLTCLVKGFYPSDIAVEWESNGQPENNYKTTPPVLDSDGSFFLYSKLTVDKSRWQQGNVFSCSVMHEALHNHYTQKSLSLSPGK

SEQ ID NO: 211 - protein, 213 aa, Artificial Sequence
  Humanized antibody - VL Chain
DIQMTQSPSTLSASVGDRVTITCSASSSVGYMHWYQQKPGKAPKLLIYDTFKLASGVPSRFSGSGSGTEFTLTISSLQPDDFATYYCFQFSGYPFTFGGGTKVEIKRTVAAPSVFIFPPSDEQLKSGTASVVCLLNNFYPREAKVQWKVDNALQSGNSQESVTEQDSKDSTYSLSSTLTLSKADYEKHKVYACEVTHQGLSSPVTKSFNRGEC

SEQ ID NO: 212 - protein, 450 aa, Artificial Sequence
  Humanized antibody - VH Chain
QVTLRESGPALVKPTQTLTLTCTFSGFSLSTPGMSVGWIRQPPGKALEWLADIWWDDKKHYNPSLKDRLTISKDTSKNQVVLKVTNMDPADTATYYCARDMIFNFYFDVWGQGTTVTVSSASTKGPSVFPLAPSSKSTSGGTAALGCLVKDYFPEPVTVSWNSGALTSGVHTFPAVLQSSGLYSLSSVVTVPSSSLGTQTYICNVNHKPSNTKVDKRVEPKSCDKTHTCPPCPAPELLGGPSVFLFPPKPKDTLMISRTPEVTCVVVDVSHEDPEVKFNWYVDGVEVHNAKTKPREEQYNSTYRVVSVLTVLHQDWLNGKEYKCKVSNKALPAPIEKTISKAKGQPREPQVYTLPPSREEMTKNQVSLTCLVKGFYPSDIAVEWESNGQPENNYKTTPPVLDSDGSFFLYSKLTVDKSRWQQGNVFSCSVMHEALHNHYTQKSLSLSPGK

SEQ ID NO: 213 - protein, 213 aa, Artificial Sequence
  Humanized antibody - VL Chain
DIQMTQSPSTLSASVGDRVTITCSLSSRVGYMHWYQQKPGKAPKLLIYDTFYLSSGVPSRFSGSGSGTEFTLTISSLQPDDFATYYCFQGSGYPFTFGGGTKVEIKRTVAAPSVFIFPPSDEQLKSGTASVVCLLNNFYPREAKVQWKVDNALQSGNSQESVTEQDSKDSTYSLSSTLTLSKADYEKHKVYACEVTHQGLSSPVTKSFNRGEC

SEQ ID NO: 214 - protein, 450 aa, Artificial Sequence
  Humanized antibody - VH Chain
QVTLRESGPALVKPTQTLTLTCTFSGFSLSTPGMSVGWIRQPPGKALEWLADIWWDGKKHYNPSLKDRLTISKDTSKNQVVLKVTNMDPADTATYYCARDMIFNFYFDVWGQGTTVTVSSASTKGPSVFPLAPSSKSTSGGTAALGCLVKDYFPEPVTVSWNSGALTSGVHTFPAVLQSSGLYSLSSVVTVPSSSLGTQTYICNVNHKPSNTKVDKRVEPKSCDKTHTCPPCPAPELLGGPSVFLFPPKPKDTLMISRTPEVTCVVVDVSHEDPEVKFNWYVDGVEVHNAKTKPREEQYNSTYRVVSVLTVLHQDWLNGKEYKCKVSNKALPAPIEKTISKAKGQPREPQVYTLPPSREEMTKNQVSLTCLVKGFYPSDIAVEWESNGQPENNYKTTPPVLDSDGSFFLYSKLTVDKSRWQQGNVFSCSVMHEALHNHYTQKSLSLSPGK

SEQ ID NO: 215 - protein, 213 aa, Artificial Sequence
  Humanized antibody - VL Chain
DIQMTQSPSTLSASVGDRVTITCSLSSRVGYMHWYQQKPGKAPKLLIYDTRGLPSGVPSRFSGSGSGTEFTLTISSLQPDDFATYYCFQGSGYPFTFGGGTKVEIKRTVAAPSVFIFPPSDEQLKSGTASVVCLLNNFYPREAKVQWKVDNALQSGNSQESVTEQDSKDSTYSLSSTLTLSKADYEKHKVYACEVTHQGLSSPVTKSFNRGEC

SEQ ID NO: 216 - protein, 450 aa, Artificial Sequence
  Humanized antibody - VH Chain
QVTLRESGPALVKPTQTLTLTCTFSGFSLSTPGMSVGWIRQPPGKALEWLADIWWDGKKHYNPSLKDRLTISKDTSKNQVVLKVTNMDPADTATYYCARDMIFNWYFDVWGQGTTVTVSSASTKGPSVFPLAPSSKSTSGGTAALGCLVKDYFPEPVTVSWNSGALTSGVHTFPAVLQSSGLYSLSSVVTVPSSSLGTQTYICNVNHKPSNTKVDKRVEPKSCDKTHTCPPCPAPELLGGPSVFLFPPKPKDTLMISRTPEVTCVVVDVSHEDPEVKFNWYVDGVEVHNAKTKPREEQYNSTYRVVSVLTVLHQDWLNGKEYKCKVSNKALPAPIEKTISKAKGQPREPQVYTLPPSREEMTKNQVSLTCLVKGFYPSDIAVEWESNGQPENNYKTTPPVLDSDGSFFLYSKLTVDKSRWQQGNVFSCSVMHEALHNHYTQKSLSLSPGK

SEQ ID NO: 217 - protein, 213 aa, Artificial Sequence
  Humanized antibody - VL Chain
DIQMTQSPSTLSASVGDRVTITCSPSSRVGYMHWYQQKPGKAPKLLIYDTMRLASGVPSRFSGSGSGTEFTLTISSLQPDDFATYYCFQGSGYPFTFGGGTKVEIKRTVAAPSVFIFPPSDEQLKSGTASVVCLLNNFYPREAKVQWKVDNALQSGNSQESVTEQDSKDSTYSLSSTLTLSKADYEKHKVYACEVTHQGLSSPVTKSFNRGEC

SEQ ID NO: 218 - protein, 450 aa, Artificial Sequence
  Humanized antibody - VH Chain
QVTLRESGPALVKPTQTLTLTCTFSGFSLSTAGMSVGWIRQPPGKALEWLADIWWDGKKHYNPSLKDRLTISKDTSKNQVVLKVTNMDPADTATYYCARDMIFNWYFDVWGQGTTVTVSSASTKGPSVFPLAPSSKSTSGGTAALGCLVKDYFPEPVTVSWNSGALTSGVHTFPAVLQSSGLYSLSSVVTVPSSSLGTQTYICNVNHKPSNTKVDKRVEPKSCDKTHTCPPCPAPELLGGPSVFLFPPKPKDTLMISRTPEVTCVVVDVSHEDPEVKFNWYVDGVEVHNAKTKPREEQYNSTYRVVSVLTVLHQDWLNGKEYKCKVSNKALPAPIEKTISKAKGQPREPQVYTLPPSREEMTKNQVSLTCLVKGFYPSDIAVEWESNGQPENNYKTTPPVLDSDGSFFLYSKLTVDKSRWQQGNVFSCSVMHEALHNHYTQKSLSLSPGK

SEQ ID NO: 219 - protein, 213 aa, Artificial Sequence
  Humanized antibody - VL Chain
DIQMTQSPSTLSASVGDRVTITCSLSSRVGYMHWYQQKPGKAPKLLIYDTFKLSSGVPSRFSGSGSGTEFTLTISSLQPDDFATYYCFQGSGYPFTFGGGTKVEIKRTVAAPSVFIFPPSDEQLKSGTASVVCLLNNFYPREAKVQWKVDNALQSGNSQESVTEQDSKDSTYSLSSTLTLSKADYEKHKVYACEVTHQGLSSPVTKSFNRGEC

SEQ ID NO: 220 - protein, 450 aa, Artificial Sequence
  Humanized antibody - VH Chain
QVTLRESGPALVKPTQTLTLTCTFSGFSLSTAGMSVGWIRQPPGKALEWLADIWWDGKKDYNPSLKDRLTISKDTSKNQVVLKVTNMDPADTATYYCARDMIFNFYFDVWGQGTTVTVSSASTKGPSVFPLAPSSKSTSGGTAALGCLVKDYFPEPVTVSWNSGALTSGVHTFPAVLQSSGLYSLSSVVTVPSSSLGTQTYICNVNHKPSNTKVDKRVEPKSCDKTHTCPPCPAPELLGGPSVFLFPPKPKDTLMISRTPEVTCVVVDVSHEDPEVKFNWYVDGVEVHNAKTKPREEQYNSTYRVVSVLTVLHQDWLNGKEYKCKVSNKALPAPIEKTISKAKGQPREPQVYTLPPSREEMTKNQVSLTCLVKGFYPSDIAVEWESNGQPENNYKTTPPVLDSDGSFFLYSKLTVDKSRWQQGNVFSCSVMHEALHNHYTQKSLSLSPGK

SEQ ID NO: 221 - protein, 213 aa, Artificial Sequence
  Humanized antibody - VL Chain
DIQMTQSPSTLSASVGDRVTITCSASSRVGYMHWYQQKPGKAPKLLIYDTFKLSSGVPSRFSGSGSGTEFTLTISSLQPDDFATYYCFQGSGYPFTFGGGTKVEIKRTVAAPSVFIFPPSDEQLKSGTASVVCLLNNFYPREAKVQWKVDNALQSGNSQESVTEQDSKDSTYSLSSTLTLSKADYEKHKVYACEVTHQGLSSPVTKSFNRGEC

SEQ ID NO: 222 - protein, 450 aa, Artificial Sequence
  Humanized antibody - VH Chain
QVTLRESGPALVKPTQTLTLTCTFSGFSLSTAGMSVGWIRQPPGKALEWLADIWWDGKKSYNPSLKDRLTISKDTSKNQVVLKVTNMDPADTATYYCARDMIFNFYFDVWGQGTTVTVSSASTKGPSVFPLAPSSKSTSGGTAALGCLVKDYFPEPVTVSWNSGALTSGVHTFPAVLQSSGLYSLSSVVTVPSSSLGTQTYICNVNHKPSNTKVDKRVEPKSCDKTHTCPPCPAPELLGGPSVFLFPPKPKDTLMISRTPEVTCVVVDVSHEDPEVKFNWYVDGVEVHNAKTKPREEQYNSTYRVVSVLTVLHQDWLNGKEYKCKVSNKALPAPIEKTISKAKGQPREPQVYTLPPSREEMTKNQVSLTCLVKGFYPSDIAVEWESNGQPENNYKTTPPVLDSDGSFFLYSKLTVDKSRWQQGNVFSCSVMHEALHNHYTQKSLSLSPGK

SEQ ID NO: 223 - protein, 213 aa, Artificial Sequence
  Humanized antibody - VL Chain
DIQMTQSPSTLSASVGDRVTITCSLSSRVGYMHWYQQKPGKAPKLLIYDTMYQSSGVPSRFSGSGSGTEFTLTISSLQPDDFATYYCFQGSGYPFTFGGGTKVEIKRTVAAPSVFIFPPSDEQLKSGTASVVCLLNNFYPREAKVQWKVDNALQSGNSQESVTEQDSKDSTYSLSSTLTLSKADYEKHKVYACEVTHQGLSSPVTKSFNRGEC

SEQ ID NO: 224 - protein, 450 aa, Artificial Sequence
  Humanized antibody - VH Chain
QVTLRESGPALVKPTQTLTLTCTFSGFSLSTAGMSVGWIRQPPGKALEWLADIWWDDKKSYNPSLKDRLTISKDTSKNQVVLKVTNMDPADTATYYCARDMIFNFYFDVWGQGTTVTVSSASTKGPSVFPLAPSSKSTSGGTAALGCLVKDYFPEPVTVSWNSGALTSGVHTFPAVLQSSGLYSLSSVVTVPSSSLGTQTYICNVNHKPSNTKVDKRVEPKSCDKTHTCPPCPAPELLGGPSVFLFPPKPKDTLMISRTPEVTCVVVDVSHEDPEVKFNWYVDGVEVHNAKTKPREEQYNSTYRVVSVLTVLHQDWLNGKEYKCKVSNKALPAPIEKTISKAKGQPREPQVYTLPPSREEMTKNQVSLTCLVKGFYPSDIAVEWESNGQPENNYKTTPPVLDSDGSFFLYSKLTVDKSRWQQGNVFSCSVMHEALHNHYTQKSLSLSPGK

SEQ ID NO: 225 - protein, 213 aa, Artificial Sequence
  Humanized antibody - VL Chain
DIQMTQSPSTLSASVGDRVTITCLPSSRVGYMHWYQQKPGKAPKLLIYDTMYQSSGVPSRFSGSGSGTEFTLTISSLQPDDFATYYCFQGSGYPFTFGGGTKVEIKRTVAAPSVFIFPPSDEQLKSGTASVVCLLNNFYPREAKVQWKVDNALQSGNSQESVTEQDSKDSTYSLSSTLTLSKADYEKHKVYACEVTHQGLSSPVTKSFNRGEC

SEQ ID NO: 226 - protein, 450 aa, Artificial Sequence
  Humanized antibody - VH Chain
QVTLRESGPALVKPTQTLTLTCTFSGFSLSTAGMSVGWIRQPPGKALEWLADIWWDDKKHYNPSLKDRLTISKDTSKNQVVLKVTNMDPADTATYYCARDMIFNFYFDVWGQGTTVTVSSASTKGPSVFPLAPSSKSTSGGTAALGCLVKDYFPEPVTVSWNSGALTSGVHTFPAVLQSSGLYSLSSVVTVPSSSLGTQTYICNVNHKPSNTKVDKRVEPKSCDKTHTCPPCPAPELLGGPSVFLFPPKPKDTLMISRTPEVTCVVVDVSHEDPEVKFNWYVDGVEVHNAKTKPREEQYNSTYRVVSVLTVLHQDWLNGKEYKCKVSNKALPAPIEKTISKAKGQPREPQVYTLPPSREEMTKNQVSLTCLVKGFYPSDIAVEWESNGQPENNYKTTPPVLDSDGSFFLYSKLTVDKSRWQQGNVFSCSVMHEALHNHYTQKSLSLSPGK

SEQ ID NO: 227 - protein, 213 aa, Artificial Sequence
  Humanized antibody - VL Chain
DIQMTQSPSTLSASVGDRVTITCSASSRVGYMHWYQQKPGKAPKLLIYDTFFLDSGVPSRFSGSGSGTEFTLTISSLQPDDFATYYCFQGSGYPFTFGGGTKVEIKRTVAAPSVFIFPPSDEQLKSGTASVVCLLNNFYPREAKVQWKVDNALQSGNSQESVTEQDSKDSTYSLSSTLTLSKADYEKHKVYACEVTHQGLSSPVTKSFNRGEC

SEQ ID NO: 228 - protein, 450 aa, Artificial Sequence
  Humanized antibody - VH Chain
QVTLRESGPALVKPTQTLTLTCTFSGFSLSTAGMSVGWIRQPPGKALEWLADIWWDDKKSYNPSLKDRLTISKDTSKNQVVLKVTNMDPADTATYYCARDMIFNWYFDVWGQGTTVTVSSASTKGPSVFPLAPSSKSTSGGTAALGCLVKDYFPEPVTVSWNSGALTSGVHTFPAVLQSSGLYSLSSVVTVPSSSLGTQTYICNVNHKPSNTKVDKRVEPKSCDKTHTCPPCPAPELLGGPSVFLFPPKPKDTLMISRTPEVTCVVVDVSHEDPEVKFNWYVDGVEVHNAKTKPREEQYNSTYRVVSVLTVLHQDWLNGKEYKCKVSNKALPAPIEKTISKAKGQPREPQVYTLPPSREEMTKNQVSLTCLVKGFYPSDIAVEWESNGQPENNYKTTPPVLDSDGSFFLYSKLTVDKSRWQQGNVFSCSVMHEALHNHYTQKSLSLSPGK

SEQ ID NO: 229 - protein, 213 aa, Artificial Sequence
  Humanized antibody - VL Chain
DIQMTQSPSTLSASVGDRVTITCSPSSRVGYMHWYQQKPGKAPKLLIYDTRYQSSGVPSRFSGSGSGTEFTLTISSLQPDDFATYYCFQGSGYPFTFGGGTKVEIKRTVAAPSVFIFPPSDEQLKSGTASVVCLLNNFYPREAKVQWKVDNALQSGNSQESVTEQDSKDSTYSLSSTLTLSKADYEKHKVYACEVTHQGLSSPVTKSFNRGEC

SEQ ID NO: 230 - protein, 450 aa, Artificial Sequence
  Humanized antibody - VH Chain
QVTLRESGPALVKPTQTLTLTCTFSGFSLSTSGMSVGWIRQPPGKALEWLADIWWDDKKDYNPSLKSRLTISKDTSKNQVVLKVTNMDPADTATYYCARSMITNWYFDVWGQGTTVTVSSASTKGPSVFPLAPSSKSTSGGTAALGCLVKDYFPEPVTVSWNSGALTSGVHTFPAVLQSSGLYSLSSVVTVPSSSLGTQTYICNVNHKPSNTKVDKRVEPKSCDKTHTCPPCPAPELLGGPSVFLFPPKPKDTLMISRTPEVTCVVVDVSHEDPEVKFNWYVDGVEVHNAKTKPREEQYNSTYRVVSVLTVLHQDWLNGKEYKCKVSNKALPAPIEKTISKAKGQPREPQVYTLPPSREEMTKNQVSLTCLVKGFYPSDIAVEWESNGQPENNYKTTPPVLDSDGSFFLYSKLTVDKSRWQQGNVFSCSVMHEALHNHYTQKSLSLSPGK

SEQ ID NO: 231 - protein, 213 aa, Artificial Sequence
  Humanized antibody - VL Chain
DIQMTQSPSTLSASVGDRVTITCSASSSVGYMHWYQQKPGKAPKLLIYDTSKLASGVPSRFSGSGSGTEFTLTISSLQPDDFATYYCFQGSGYPFTFGGGTKVEIKRTVAAPSVFIFPPSDEQLKSGTASVVCLLNNFYPREAKVQWKVDNALQSGNSQESVTEQDSKDSTYSLSSTLTLSKADYEKHKVYACEVTHQGLSSPVTKSFNRGEC

SEQ ID NO: 232 - protein, 450 aa, Artificial Sequence
  Humanized antibody - VH Chain
QVTLRESGPALVKPTQTLTLTCTFSGFSLSTAGMSVGWIRQPPGKALEWLADIWWDDKKDYNPSLKSRLTISKDTSKNQVVLKVTNMDPADTATYYCARDMIFNWYFDVWGQGTTVTVSSASTKGPSVFPLAPSSKSTSGGTAALGCLVKDYFPEPVTVSWNSGALTSGVHTFPAVLQSSGLYSLSSVVTVPSSSLGTQTYICNVNHKPSNTKVDKRVEPKSCDKTHTCPPCPAPELLGGPSVFLFPPKPKDTLMISRTPEVTCVVVDVSHEDPEVKFNWYVDGVEVHNAKTKPREEQYNSTYRVVSVLTVLHQDWLNGKEYKCKVSNKALPAPIEKTISKAKGQPREPQVYTLPPSREEMTKNQVSLTCLVKGFYPSDIAVEWESNGQPENNYKTTPPVLDSDGSFFLYSKLTVDKSRWQQGNVFSCSVMHEALHNHYTQKSLSLSPGK

SEQ ID NO: 233 - protein, 213 aa, Artificial Sequence
  Humanized antibody - VL Chain
DIQMTQSPSTLSASVGDRVTITCSASSSVGYMHWYQQKPGKAPKLLIYDTFKLASGVPSRFSGSGSGTEFTLTISSLQPDDFATYYCFQGSGYPFTFGGGTKVEIKRTVAAPSVFIFPPSDEQLKSGTASVVCLLNNFYPREAKVQWKVDNALQSGNSQESVTEQDSKDSTYSLSSTLTLSKADYEKHKVYACEVTHQGLSSPVTKSFNRGEC

SEQ ID NO: 234 - protein, 450 aa, Artificial Sequence; identical to SEQ ID NO: 232
  Humanized antibody - VH Chain

SEQ ID NO: 235 - protein, 213 aa, Artificial Sequence
  Humanized antibody - VL Chain
DIQMTQSPSTLSASVGDRVTITCSASSSVGYMHWYQQKPGKAPKLLIYDTYKQTSGVPSRFSGSGSGTEFTLTISSLQPDDFATYYCFQGSGYPFTFGGGTKVEIKRTVAAPSVFIFPPSDEQLKSGTASVVCLLNNFYPREAKVQWKVDNALQSGNSQESVTEQDSKDSTYSLSSTLTLSKADYEKHKVYACEVTHQGLSSPVTKSFNRGEC

SEQ ID NO: 236 - protein, 450 aa, Artificial Sequence; identical to SEQ ID NO: 232
  Humanized antibody - VH Chain

SEQ ID NO: 237 - protein, 213 aa, Artificial Sequence
  Humanized antibody - VL Chain
DIQMTQSPSTLSASVGDRVTITCSASSSVGYMHWYQQKPGKAPKLLIYDTRYLSSGVPSRFSGSGSGTEFTLTISSLQPDDFATYYCFQGSGYPFTFGGGTKVEIKRTVAAPSVFIFPPSDEQLKSGTASVVCLLNNFYPREAKVQWKVDNALQSGNSQESVTEQDSKDSTYSLSSTLTLSKADYEKHKVYACEVTHQGLSSPVTKSFNRGEC

SEQ ID NO: 238 - protein, 450 aa, Artificial Sequence
  Humanized antibody - VH Chain
QVTLRESGPALVKPTQTLTLTCTFSGFSLSTAGMSVGWIRQPPGKALEWLADIWWDDKKDYNPSLKSRLTISKDTSKNQVVLKVTNMDPADTATYYCARDMITNFYFDVWGQGTTVTVSSASTKGPSVFPLAPSSKSTSGGTAALGCLVKDYFPEPVTVSWNSGALTSGVHTFPAVLQSSGLYSLSSVVTVPSSSLGTQTYICNVNHKPSNTKVDKRVEPKSCDKTHTCPPCPAPELLGGPSVFLFPPKPKDTLMISRTPEVTCVVVDVSHEDPEVKFNWYVDGVEVHNAKTKPREEQYNSTYRVVSVLTVLHQDWLNGKEYKCKVSNKALPAPIEKTISKAKGQPREPQVYTLPPSREEMTKNQVSLTCLVKGFYPSDIAVEWESNGQPENNYKTTPPVLDSDGSFFLYSKLTVDKSRWQQGNVFSCSVMHEALHNHYTQKSLSLSPGK

SEQ ID NO: 239 - protein, 213 aa, Artificial Sequence; identical to SEQ ID NO: 233
  Humanized antibody - VL Chain

SEQ ID NO: 240 - protein, 450 aa, Artificial Sequence; identical to SEQ ID NO: 210
  Humanized antibody - VH Chain

SEQ ID NO: 241 - protein, 213 aa, Artificial Sequence
  Humanized antibody - VH Chain
DIQMTQSPSTLSASVGDRVTITCSASSSVGYMHWYQQKPGKAPKLLIYDTFKLASGVPSRFSGSGSGTEFTLTISSLQPDDFATYYCFQGSFYPFTFGGGTKVEIKRTVAAPSVFIFPPSDEQLKSGTASVVCLLNNFYPREAKVQWKVDNALQSGNSQESVTEQDSKDSTYSLSSTLTLSKADYEKHKVYACEVTHQGLSSPVTKSFNRGEC

SEQ ID NO: 242 - protein, 450 aa, Artificial Sequence; identical to SEQ ID NO: 238
  Humanized antibody - VH Chain

SEQ ID NO: 243 - protein, 213 aa, Artificial Sequence
  Humanized antibody - VL Chain
DIQMTQSPSTLSASVGDRVTITCSASSSVGYMHWYQQKPGKAPKLLIYDTFKLTSGVPSRFSGSGSGTEFTLTISSLQPDDFATYYCFQGSGYPFTFGGGTKVEIKRTVAAPSVFIFPPSDEQLKSGTASVVCLLNNFYPREAKVQWKVDNALQSGNSQESVTEQDSKDSTYSLSSTLTLSKADYEKHKVYACEVTHQGLSSPVTKSFNRGEC

SEQ ID NO: 244 - protein, 450 aa, Artificial Sequence; identical to SEQ ID NO: 238
  Humanized antibody - VH Chain

SEQ ID NO: 245 - protein, 213 aa, Artificial Sequence
  Humanized antibody - VL Chain
DIQMTQSPSTLSASVGDRVTITCSASSRVGYMHWYQQKPGKAPKLLIYDTFKLASGVPSRFSGSGSGTEFTLTISSLQPDDFATYYCFQGSGYPFTFGGGTKVEIKRTVAAPSVFIFPPSDEQLKSGTASVVCLLNNFYPREAKVQWKVDNALQSGNSQESVTEQDSKDSTYSLSSTLTLSKADYEKHKVYACEVTHQGLSSPVTKSFNRGEC

SEQ ID NO: 246 - protein, 450 aa, Artificial Sequence; identical to SEQ ID NO: 238
  Humanized antibody - VH Chain

SEQ ID NO: 247 - protein, 213 aa, Artificial Sequence
  Humanized antibody - VL Chain
DIQMTQSPSTLSASVGDRVTITCSASSSVGYMHWYQQKPGKAPKLLIYDTFRLASGVPSRFSGSGSGTEFTLTISSLQPDDFATYYCFQGSGYPFTFGGGTKVEIKRTVAAPSVFIFPPSDEQLKSGTASVVCLLNNFYPREAKVQWKVDNALQSGNSQESVTEQDSKDSTYSLSSTLTLSKADYEKHKVYACEVTHQGLSSPVTKSFNRGEC

SEQ ID NO: 248 - protein, 450 aa, Artificial Sequence
  Humanized antibody - VH Chain
QVTLRESGPALVKPTQTLTLTCTFSGFSLSTAGMSVGWIRQPPGKALEWLADIWWDDKKHYNPSLKDRLTISKDTSKNQVVLKVTNMDPADTATYYCARDMIFNWYFDVWGQGTTVTVSSASTKGPSVFPLAPSSKSTSGGTAALGCLVKDYFPEPVTVSWNSGALTSGVHTFPAVLQSSGLYSLSSVVTVPSSSLGTQTYICNVNHKPSNTKVDKRVEPKSCDKTHTCPPCPAPELLGGPSVFLFPPKPKDTLMISRTPEVTCVVVDVSHEDPEVKFNWYVDGVEVHNAKTKPREEQYNSTYRVVSVLTVLHQDWLNGKEYKCKVSNKALPAPIEKTISKAKGQPREPQVYTLPPSREEMTKNQVSLTCLVKGFYPSDIAVEWESNGQPENNYKTTPPVLDSDGSFFLYSKLTVDKSRWQQGNVFSCSVMHEALHNHYTQKSLSLSPGK

SEQ ID NO: 249 - protein, 213 aa, Artificial Sequence
  Humanized antibody - VL Chain
DIQMTQSPSTLSASVGDRVTITCSPSSRVGYMHWYQQKPGKAPKLLIYDTYRHSSGVPSRFSGSGSGTEFTLTISSLQPDDFATYYCFQGSGYPFTFGGGTKVEIKRTVAAPSVFIFPPSDEQLKSGTASVVCLLNNFYPREAKVQWKVDNALQSGNSQESVTEQDSKDSTYSLSSTLTLSKADYEKHKVYACEVTHQGLSSPVTKSFNRGEC

SEQ ID NO: 250 - protein, 450 aa, Artificial Sequence; identical to SEQ ID NO: 218
  Humanized antibody - VH Chain

SEQ ID NO: 251 - protein, 213 aa, Artificial Sequence
  Humanized antibody - VL Chain
DIQMTQSPSTLSASVGDRVTITCSLSSSVGYMHWYQQKPGKAPKLLIYDTFFHRSGVPSRFSGSGSGTEFTLTISSLQPDDFATYYCFQGSGYPFTFGGGTKVEIKRTVAAPSVFIFPPSDEQLKSGTASVVCLLNNFYPREAKVQWKVDNALQSGNSQESVTEQDSKDSTYSLSSTLTLSKADYEKHKVYACEVTHQGLSSPVTKSFNRGEC

SEQ ID NO: 252 - protein, 450 aa, Artificial Sequence; identical to SEQ ID NO: 226
  Humanized antibody - VH Chain

SEQ ID NO: 253 - protein, 213 aa, Artificial Sequence
  Humanized antibody - VL Chain
DIQMTQSPSTLSASVGDRVTITCSASSRVGYMHWYQQKPGKAPKLLIYDTLLLDSGVPSRFSGSGSGTEFTLTISSLQPDDFATYYCFQGSGYPFTFGGGTKVEIKRTVAAPSVFIFPPSDEQLKSGTASVVCLLNNFYPREAKVQWKVDNALQSGNSQESVTEQDSKDSTYSLSSTLTLSKADYEKHKVYACEVTHQGLSSPVTKSFNRGEC

SEQ ID NO: 254 - protein, 450 aa, Artificial Sequence; identical to SEQ ID NO: 226
  Humanized antibody - VH Chain

SEQ ID NO: 255 - protein, 213 aa, Artificial Sequence
  Humanized antibody - VL Chain
DIQMTQSPSTLSASVGDRVTITCSASSRVGYMHWYQQKPGKAPKLLIYDTSKLASGVPSRFSGSGSGTEFTLTISSLQPDDFATYYCFQGSGYPFTFGGGTKVEIKRTVAAPSVFIFPPSDEQLKSGTASVVCLLNNFYPREAKVQWKVDNALQSGNSQESVTEQDSKDSTYSLSSTLTLSKADYEKHKVYACEVTHQGLSSPVTKSFNRGEC

SEQ ID NO: 256 - protein, 450 aa, Artificial Sequence; identical to SEQ ID NO: 226
  Humanized antibody - VH Chain

SEQ ID NO: 257 - protein, 213 aa, Artificial Sequence
  Humanized antibody - VL Chain
DIQMTQSPSTLSASVGDRVTITCSASSRVGYMHWYQQKPGKAPKLLIYDTSFLDSGVPSRFSGSGSGTEFTLTISSLQPDDFATYYCFQGSGYPFTFGGGTKVEIKRTVAAPSVFIFPPSDEQLKSGTASVVCLLNNFYPREAKVQWKVDNALQSGNSQESVTEQDSKDSTYSLSSTLTLSKADYEKHKVYACEVTHQGLSSPVTKSFNRGEC

SEQ ID NO: 258 - DNA, 26 bp, Artificial
  Description of Artificial Sequence: Primer
agtgtcttaaccagcaaagtgttaga

SEQ ID NO: 259 - DNA, 26 bp, Artificial Sequence
  Description of Artificial Sequence: Primer
tcattgacttgagatattgatgcatc

SEQ ID NO: 260 - protein, 15 aa, Artificial Sequence
  Linker for constructing humanized antibodies
GGGGSGGGGSGGGGS

SEQ ID NO: 261 - protein, 15 aa, Artificial Sequence
  Linker for constructing humanized antibodies
ESGRSGGGGSGGGGS

SEQ ID NO: 262 - protein, 14 aa, Artificial Sequence
  Linker for constructing humanized antibodies
EGKSSGSGSESKST

SEQ ID NO: 263 - protein, 15 aa, Artificial Sequence
  Linker for constructing humanized antibodies
EGKSSGSGSESKSTQ

SEQ ID NO: 264 - protein, 14 aa, Artificial Sequence
  Linker for constructing humanized antibodies
EGKSSGSGSESKVD

SEQ ID NO: 265 - protein, 14 aa, Artificial Sequence
  Linker for constructing humanized antibodies
GSTSGSGKSSEGKG

SEQ ID NO: 266 - protein, 18 aa, Artificial Sequence
  Linker for constructing humanized antibodies
KESGSVSSEQLAQFRSLD

SEQ ID NO: 267 - protein, 16 aa, Artificial Sequence
  Linker for constructing humanized antibodies
ESGSVSSEELAFRSLD

SEQ ID NO: 268 - protein, 4 aa, Homo sapiens
  intrabody
KDEL

SEQ ID NO: 269 - protein, 4 aa, Homo sapiens
  intrabody
DDEL

SEQ ID NO: 270 - protein, 4 aa, Homo sapiens
  intrabody
DEEL

SEQ ID NO: 271 - protein, 4 aa, Homo sapiens
  intrabody
QEDL

SEQ ID NO: 272 - protein, 4 aa, Homo sapiens
  intrabody
RDEL

SEQ ID NO: 273 - protein, 7 aa, Homo sapiens
  intrabody
PKKKRKV

SEQ ID NO: 274 - protein, 7 aa, Homo sapiens
  intrabody
PQKKIKS

SEQ ID NO: 275 - protein, 5 aa, Homo sapiens
  intrabody
QPKKP

SEQ ID NO: 276 - protein, 4 aa, Homo sapiens
  intrabody
RKKR

SEQ ID NO: 277 - protein, 5 aa, Homo sapiens
  intrabody
KKKRK

SEQ ID NO: 278 - protein, 12 aa, Homo sapiens
  intrabody
RKKRRQRRRAHQ

SEQ ID NO: 279 - protein, 16 aa, Homo sapiens
  intrabody
RQARRNRRRRWRERQR

SEQ ID NO: 280 - protein, 19 aa, Homo sapiens
  intrabody
MPLTRRRPAASQALAPPTP

SEQ ID NO: 281 - protein, 15 aa, Homo sapiens
  intrabody
MDDQRDLISNNEQLP

SEQ ID NO: 282 - protein, 32 aa, Homo sapiens
  intrabody
  misc_feature 7, 8, 32,: Xaa can be any naturally occurring amino acid
MLFNLRXXLNNAAFRHGHNFMVRNFRCGQPLX

SEQ ID NO: 283 - protein, 3 aa, Homo sapiens
  intrabody
AKL

SEQ ID NO: 284 - protein, 6 aa, Homo sapiens
  intrabody
SDYQRL

SEQ ID NO: 285 - protein, 8 aa, Homo sapiens
  intrabody
GCVCSSNP

SEQ ID NO: 286 - protein, 8 aa, Homo sapiens
  intrabody
GQTVTTPL

SEQ ID NO: 287 - protein, 8 aa, Homo sapiens
  intrabody
GQELSQHE

SEQ ID NO: 288 - protein, 8 aa, Homo sapiens
  intrabody
GNSPSYNP

SEQ ID NO: 289 - protein, 8 aa, Homo sapiens
  intrabody
GVSGSKGQ

SEQ ID NO: 290 - protein, 8 aa, Homo sapiens
  intrabody
GQTITTPL

SEQ ID NO: 291 - protein, 8 aa, Homo sapiens
  intrabody
GQTLTTPL

SEQ ID NO: 292 - protein, 8 aa, Homo sapiens
  intrabody
GQIFSRSA

SEQ ID NO: 293 - protein, 8 aa, Homo sapiens
  intrabody
GQIHGLSP

SEQ ID NO: 294 - protein, 8 aa, Homo sapiens
  intrabody
GARASVLS

SEQ ID NO: 295 - protein, 8 aa, Homo sapiens
  intrabody
GCTLSAEE

SEQ ID NO: 296 - protein, 16 aa, Homo sapiens
  intrabody
AAVALLPAVLLALLAP

SEQ ID NO: 297 - protein, 12 aa, Homo sapiens
  intrabody
AAVLLPVLLAAP

SEQ ID NO: 298 - protein, 15 aa, Homo sapiens
  intrabody
VTVLALGALAGVGVG

SEQ ID NO: 299 - DNA, 30 bp, Artificial Sequence
  Description of Artificial Sequence: Primer
ccagcagtaccacttccttgccctgcgccg

SEQ ID NO: 300 - DNA, 30 bp, Artificial Sequence
  Description of Artificial Sequence: Primer
gccgcgtcccgttccttcaccatgacgacc

SEQ ID NO: 301 - DNA, 31 bp, Artificial Sequence
  Description of Artificial Sequence: Primer
ccagcagtaccgcttccttgccctgcggccg

SEQ ID NO: 302 - DNA, 30 bp, Artificial Sequence; identical to SEQ ID NO: 300
  Description of Artificial Sequence: Primer

SEQ ID NO: 303 - protein, 450 aa, Artificial Sequence
  Humanized antibody - VH Chain
QVTLRESGPALVKPTQTLTLTCTFSGFSLSTAGMSVGWIRQPPGKALEWLADIWWGDKGHYNPSLKDRLTISKDTSKNQVVLKVTNMDPADTATYYCARDMIFNWYFDVWGQGTTVTVSSASTKGPSVFPLAPSSKSTSGGTAALGCLVKDYFPEPVTVSWNSGALTSGVHTFPAVLQSSGLYSLSSVVTVPSSSLGTQTYICNVNHKPSNTKVDKRVEPKSCDKTHTCPPCPAPELLGGPSVFLFPPKPKDTLMISRTPEVTCVVVDVSHEDPEVKFNWYVDGVEVHNAKTKPREEQYNSTYRVVSVLTVLHQDWLNGKEYKCKVSNKALPAPIEKTISKAKGQPREPQVYTLPPSREEMTKNQVSLTCLVKGFYPSDIAVEWESNGQPENNYKTTPPVLDSDGSFFLYSKLTVDKSRWQQGNVFSCSVMHEALHNHYTQKSLSLSPGK

SEQ ID NO: 304 - protein, 120 aa, Artificial Sequence
  Humanized antibody - VH Domain
QVTLRESGPALVKPTQTLTLTCTFSGFSLSTAGMSVGWIRQPPGKALEWLADIWWGDKGHYNPSLKDRLTISKDTSKNQVVLKVTNMDPADTATYYCARDMIFNWYFDVWGQGTTVTVSS

SEQ ID NO: 305 - protein, 16 aa, Artificial Sequence
  Amino acid sequence derived from Murine monoclonal antibody and further modified by amino acid substitutions
DIWWGDKGHYNPSLKD

SEQ ID NO: 306 - protein, 213 aa, Artificial Sequence
  Humanized antibody - VL Chain
DIQMTQSPSTLSASVGDRVTITCSASSSVGYMHWYQQKPGKAPKLLIYDTFYLHSGVPSRFSGSGSGTEFTLTISSLQPDDFATYYCFQGSGYPFTFGGGTKVEIKRTVAAPSVFIFPPSDEQLKSGTASVVCLLNNFYPREAKVQWKVDNALQSGNSQESVTEQDSKDSTYSLSSTLTLSKADYEKHKVYACEVTHQGLSSPVTKSFNRGEC

SEQ ID NO: 307 - protein, 106 aa, Artificial Sequence
  Humanized antibody - VL Domain
DIQMTQSPSTLSASVGDRVTITCSASSSVGYMHWYQQKPGKAPKLLIYDTFYLHSGVPSRFSGSGSGTEFTLTISSLQPDDFATYYCFQGSGYPFTFGGGTKVEIK

SEQ ID NO: 308 - protein, 7 aa, Artificial Sequence
  Amino acid sequence derived from Murine monoclonal antibody and further modified by amino acid substitutions
DTFYLHS

SEQ ID NO: 309 - protein, 450 aa, Artificial Sequence
  Humanized antibody - VH Chain
QVTLRESGPALVKPTQTLTLTCTFSGFSLSTAGMSVGWIRQPPGKALEWLADIWWDDKKSYNPSLKDRLTISKDTSKNQVVLKVTNMDPADTATYYCARDMITNWYFDVWGQGTTVTVSSASTKGPSVFPLAPSSKSTSGGTAALGCLVKDYFPEPVTVSWNSGALTSGVHTFPAVLQSSGLYSLSSVVTVPSSSLGTQTYICNVNHKPSNTKVDKRVEPKSCDKTHTCPPCPAPELLGGPSVFLFPPKPKDTLMISRTPEVTCVVVDVSHEDPEVKFNWYVDGVEVHNAKTKPREEQYNSTYRVVSVLTVLHQDWLNGKEYKCKVSNKALPAPIEKTISKAKGQPREPQVYTLPPSREEMTKNQVSLTCLVKGFYPSDIAVEWESNGQPENNYKTTPPVLDSDGSFFLYSKLTVDKSRWQQGNVFSCSVMHEALHNHYTQKSLSLSPGK

SEQ ID NO: 310 - protein, 120 aa, Artificial Sequence
  Humanized antibody - VH Domain
QVTLRESGPALVKPTQTLTLTCTFSGFSLSTAGMSVGWIRQPPGKALEWLADIWWDDKKSYNPSLKDRLTISKDTSKNQVVLKVTNMDPADTATYYCARDMITNWYFDVWGQGTTVTVSS

SEQ ID NO: 311 - protein, 10 aa, Artificial Sequence
  Amino acid sequence derived from Murine monoclonal antibody and further modified by amino acid substitutions
DMITNWYFDV

SEQ ID NO: 312 - protein, 213 aa, Artificial Sequence
  Humanized antibody - VL Chain
DIQMTQSPSTLSASVGDRVTITCLLSSRVGYMHWYQQKPGKAPKLLIYDTYYQTSGVPSRFSGSGSGTEFTLTISSLQPDDFATYYCFQGSGYPFTFGGGTKVEIKRTVAAPSVFIFPPSDEQLKSGTASVVCLLNNFYPREAKVQWKVDNALQSGNSQESVTEQDSKDSTYSLSSTLTLSKADYEKHKVYACEVTHQGLSSPVTKSFNRGEC

SEQ ID NO: 313 - protein, 106 aa, Artificial Sequence
  Humanized antibody - VL Domain
DIQMTQSPSTLSASVGDRVTITCLLSSRVGYMHWYQQKPGKAPKLLIYDTYYQTSGVPSRFSGSGSGTEFTLTISSLQPDDFATYYCFQGSGYPFTFGGGTKVEIK

SEQ ID NO: 314 - protein, 10 aa, Artificial Sequence
  Amino acid sequence derived from Murine monoclonal antibody and further modified by amino acid substitutions
LLSSRVGYMH

SEQ ID NO: 315 - protein, 7 aa, Artificial Sequence
  Amino acid sequence derived from Murine monoclonal antibody and further modified by amino acid substitutions
DTYYQTS

SEQ ID NO: 316 - protein, 450 aa, Artificial Sequence; identical to SEQ ID NO: 248
  Humanized antibody - VH Chain

SEQ ID NO: 317 - protein, 120 aa, Artificial Sequence; identical to SEQ ID NO: 67
  Humanized antibody - VH Domain

SEQ ID NO: 318 - protein, 213 aa, Artificial Sequence
  Humanized antibody - VL Chain
DIQMTQSPSTLSASVGDRVTITCLLSSRVGYMHWYQQKPGKAPKLLIYDTMYQASGVPSRFSGSGSGTEFTLTISSLQPDDFATYYCFQGSGYPFTFGGGTKVEIKRTVAAPSVFIFPPSDEQLKSGTASVVCLLNNFYPREAKVQWKVDNALQSGNSQESVTEQDSKDSTYSLSSTLTLSKADYEKHKVYACEVTHQGLSSPVTKSFNRGEC

SEQ ID NO: 319 - protein, 106 aa, Artificial Sequence
  Humanized antibody - VL Domain
DIQMTQSPSTLSASVGDRVTITCLLSSRVGYMHWYQQKPGKAPKLLIYDTMYQASGVPSRFSGSGSGTEFTLTISSLQPDDFATYYCFQGSGYPFTFGGGTKVEIK

SEQ ID NO: 320 - protein, 10 aa, Artificial Sequence
  Amino acid sequence derived from Murine monoclonal antibody and further modified by amino acid substitutions
LLSSRVGYMH

SEQ ID NO: 321 - protein, 7 aa, Artificial Sequence
  Amino acid sequence derived from Murine monoclonal antibody and further modified by amino acid substitutions
DTMYQAS

SEQ ID NO: 322 - protein, 450 aa, Artificial Sequence; identical to SEQ ID NO: 248
  Humanized antibody - VH Chain

SEQ ID NO: 323 - protein, 120 aa, Artificial Sequence; identical to SEQ ID NO: 67
  Humanized antibody - VH Domain

SEQ ID NO: 324 - protein, 213 aa, Artificial Sequence
  Humanized antibody - VL Chain
DIQMTQSPSTLSASVGDRVTITCSLSSRVGYMHWYQQKPGKAPKLLIYDTYYLPSGVPSRFSGSGSGTEFTLTISSLQPDDFATYYCFQGSGYPFTFGGGTKVEIKRTVAAPSVFIFPPSDEQLKSGTASVVCLLNNFYPREAKVQWKVDNALQSGNSQESVTEQDSKDSTYSLSSTLTLSKADYEKHKVYACEVTHQGLSSPVTKSFNRGEC

SEQ ID NO: 325 - protein, 106 aa, Artificial Sequence
  Humanized antibody - VL Domain
DIQMTQSPSTLSASVGDRVTITCSLSSRVGYMHWYQQKPGKAPKLLIYDTYYLPSGVPSRFSGSGSGTEFTLTISSLQPDDFATYYCFQGSGYPFTFGGGTKVEIK

SEQ ID NO: 326 - protein, 7 aa, Artificial Sequence
  Amino acid sequence derived from Murine monoclonal antibody and further modified by amino acid substitutions
DTYYLPS

SEQ ID NO: 327 - protein, 450 aa, Artificial Sequence
  Humanized antibody - VH Chain
QVTLRESGPALVKPTQTLTLTCTFSGFSLSTAGMSVGWIRQPPGKALEWLADIWWDDKKDYNPSLKDRLTISKDTSKNQVVLKVTNMDPADTATYYCARDMIFNWYFDVWGQGTTVTVSSASTKGPSVFPLAPSSKSTSGGTAALGCLVKDYFPEPVTVSWNSGALTSGVHTFPAVLQSSGLYSLSSVVTVPSSSLGTQTYICNVNHKPSNTKVDKRVEPKSCDKTHTCPPCPAPELLGGPSVFLFPPKPKDTLMISRTPEVTCVVVDVSHEDPEVKFNWYVDGVEVHNAKTKPREEQYNSTYRVVSVLTVLHQDWLNGKEYKCKVSNKALPAPIEKTISKAKGQPREPQVYTLPPSREEMTKNQVSLTCLVKGFYPSDIAVEWESNGQPENNYKTTPPVLDSDGSFFLYSKLTVDKSRWQQGNVFSCSVMHEALHNHYTQKSLSLSPGK

SEQ ID NO: 328 - protein, 120 aa, Artificial Sequence
  Humanized antibody - VH Domain
QVTLRESGPALVKPTQTLTLTCTFSGFSLSTAGMSVGWIRQPPGKALEWLADIWWDDKKDYNPSLKDRLTISKDTSKNQVVLKVTNMDPADTATYYCARDMIFNWYFDVWGQGTTVTVSS

SEQ ID NO: 329 - protein, 16 aa, Artificial Sequence
  Amino acid sequence derived from Murine monoclonal antibody and further modified by amino acid substitutions
DIWWDDKKDYNPSLKD

SEQ ID NO: 330 - protein, 213 aa, Artificial Sequence
  Humanized antibody - VL Chain
DIQMTQSPSTLSASVGDRVTITCSLSSRVGYMHWYQQKPGKAPKLLIYDTFRHTSGVPSRFSGSGSGTEFTLTISSLQPDDFATYYCFQGSGYPFTFGGGTKVEIKRTVAAPSVFIFPPSDEQLKSGTASVVCLLNNFYPREAKVQWKVDNALQSGNSQESVTEQDSKDSTYSLSSTLTLSKADYEKHKVYACEVTHQGLSSPVTKSFNRGEC

SEQ ID NO: 331 - protein, 106 aa, Artificial Sequence
  Humanized antibody - VL Domain
DIQMTQSPSTLSASVGDRVTITCSLSSRVGYMHWYQQKPGKAPKLLIYDTFRHTSGVPSRFSGSGSGTEFTLTISSLQPDDFATYYCFQGSGYPFTFGGGTKVEIK

SEQ ID NO: 332 - protein, 7 aa, Artificial Sequence
  Amino acid sequence derived from Murine monoclonal antibody and further modified by amino acid substitutions
DTFRHTS

SEQ ID NO: 333 - protein, 213 aa, Artificial Sequence
  Humanized antibody - VL Chain
DIQMTQSPSTLSASVGDRVTITCSPSSSVGYMHWYQQKPGKAPKLLIYDTYYLASGVPSRFSGSGSGTEFTLTISSLQPDDFATYYCFQGSGYPFTFGGGTKVEIKRTVAAPSVFIFPPSDEQLKSGTASVVCLLNNFYPREAKVQWKVDNALQSGNSQESVTEQDSKDSTYSLSSTLTLSKADYEKHKVYACEVTHQGLSSPVTKSFNRGEC

SEQ ID NO: 334 - protein, 106 aa, Artificial Sequence
  Humanized antibody - VL Domain
DIQMTQSPSTLSASVGDRVTITCSPSSSVGYMHWYQQKPGKAPKLLIYDTYYLASGVPSRFSGSGSGTEFTLTISSLQPDDFATYYCFQGSGYPFTFGGGTKVEIK

SEQ ID NO: 335 - protein, 10 aa, Artificial Sequence
  Amino acid sequence derived from Murine monoclonal antibody and further modified by amino acid substitutions
SPSSSVGYMH

SEQ ID NO: 336 - protein, 7 aa, Artificial Sequence
  Amino acid sequence derived from Murine monoclonal antibody and further modified by amino acid substitutions
DTYYLAS

SEQ ID NO: 337 - protein, 365 aa, Homo sapiens
  Human FcRn
MGVPRPQPWALGLLLFLLPGSLGAESHLSLLYHLTAVSSPAPGTPAFWVSGWLGPQQYLSYNSLRGEAEPCGAWVWENQVSWYWEKETTDLRIKEKLFLEAFKALGGKGPYTLQGLLGCELGPDNTSVPTAKFALNGEEFMNFDLKQGTWGGDWPEALAISQRWQQQDKAANKELTFLLFSCPHRLREHLERGRGNLEWKEPPSMRLKARPSSPGFSVLTCSAFSFYPPELQLRFLRNGLAAGTGQGDFGPNSDGSFHASSSLTVKSGDEHHYCCIVQHAGLAQPLRVELESPAKSSVLVVGIVIGVLLLTAAAVGGALLWRRMRSGLPAPWISLRGDDTGVLLPTPGEAQDADLKDVNVIPATA

SEQ ID NO: 338 - protein, 365 aa, Murine
MGMPLPWALSLLLVLLPQTWGSETRPPLMYHLTAVSNPSTGLPSFWATGWLGPQQYLTYNSLRQEADPCGAWVWENQVSWYWEKETTDLKSKEQLFLEALKTLEKILNGTYTLQGLLGCELASDNSSVPTAVFALNGEEFMKFNPRIGNWTGEWPETEIVANLWMKQPDAARKESEFLLNSCPERLLGHLERGRRNLEWKEPPSMRLKARPGNSGSSVLTCAAFSFYPPELKFRFLRNGLASGSGNCSTGPNGDGSFHAWSLLEVKRGDEHHYQCQVEHEGLAQPLTVDLDSSARSSVPVVGIVLGLLLVVVAIAGGVLLWGRMRSGLPAPWLSLSGDDSGDLLPGGNLPPEAEPQGANAFPATS

SEQ ID NO: 339 - protein, 110 aa, Homo sapiens
APELLGGPSVFLFPPKPKDTLMISRTPEVTCVVVDVSHEDPEVKFNWYVDGVEVHNAKTKPREEQYNSTYRVVSVLTVLHQDWLNGKEYKCKVSNKALPAPIEKTISKAK

SEQ ID NO: 340 - protein, 107 aa, Homo sapiens
GQPREPQVYTLPPSREEMTKNQVSLTCLVKGFYPSDIAVEWESNGQPENNYKTTPPVLDSDGSFFLYSKLTVDKSRWQQGNVFSCSVMHEALHNHYTQKSLSLSPGK

SEQ ID NO: 341 - protein, 15 aa, Homo sapiens
EPKSCDKTHTCPPCP

SEQ ID NO: 342 - protein, 232 aa, Homo sapiens
  Human hinge Fc region
EPKSCDKTHTCPPCPAPELLGGPSVFLFPPKPKDTLMISRTPEVTCVVVDVSHEDPEVKFNWYVDGVEVHNAKTKPREEQYNSTYRVVSVLTVLHQDWLNGKEYKCKVSNKALPAPIEKTISKAKGQPREPQVYTLPPSREEMTKNQVSLTCLVKGFYPSDIAVEWESNGQPENNYKTTPPVLDSDGSFFLYSKLTVDKSRWQQGNVFSCSVMHEALHNHYTQKSLSLSPGK

SEQ ID NO: 343 - protein, 120 aa, Artificial Sequence
  Humanized antibody - VH Domain
QVTLRESGPALVKPTQTLTLTCTFSGFSLSTSGMSVGWIRQPPGKALEWLADIWWDDKKDYNPSLKSRLTISKDTSKNQVVLKVTNMDPADTATYYCARSMITNWYFDVWGQGTTVTVSS

SEQ ID NO: 344 - protein, 7 aa, Artificial Sequence
  Amino acid sequence derived from Murine monoclonal antibody and further modified by amino acid substitutions
VLHQDWL

SEQ ID NO: 345 - protein, 6 aa, Artificial Sequence
  Amino acid sequence derived from Murine monoclonal antibody and further modified by amino acid substitutions
LMISRT

SEQ ID NO: 346 - protein, 9 aa, Artificial Sequence
  Amino acid sequence derived from Murine monoclonal antibody and further modified by amino acid substitutions
MHEALHNHY

SEQ ID NO: 347 - protein, 5 aa, Artificial Sequence
  Amino acid sequence derived from Murine monoclonal antibody and further modified by amino acid substitutions
GQPEN

SEQ ID NO: 348 - protein, 6 aa, Artificial Sequence
  Mutants isolated from Library by panning
LYITRE

SEQ ID NO: 349 - protein, 6 aa, Artificial Sequence
  Mutants isolated from Library by panning
LYISRT

SEQ ID NO: 350 - protein, 6 aa, Artificial Sequence
  Mutants isolated from Library by panning
LYISRS

SEQ ID NO: 351 - protein, 6 aa, Artificial Sequence
  Mutants isolated from Library by panning
LYISRR

SEQ ID NO: 352 - protein, 6 aa, Artificial Sequence
  Mutants isolated from Library by panning
LYISRQ

SEQ ID NO: 353 - protein, 6 aa, Artificial Sequence
  Mutants isolated from Library by panning
LWISRT

SEQ ID NO: 354 - protein, 6 aa, Artificial Sequence
  Mutants isolated from Library by panning
LYISLQ

SEQ ID NO: 355 - protein, 6 aa, Artificial Sequence
  Mutants isolated from Library by panning
LFISRD

SEQ ID NO: 356 - protein, 6 aa, Artificial Sequence
  Mutants isolated from Library by panning
LFISRT

SEQ ID NO: 357 - protein, 6 aa, Artificial Sequence
  Mutants isolated from Library by panning
LFISRR

SEQ ID NO: 358 - protein, 6 aa, Artificial Sequence
  Mutants isolated from Library by panning
LFITGA

SEQ ID NO: 359 - protein, 6 aa, Artificial Sequence
  Mutants isolated from Library by panning
LSISRE

SEQ ID NO: 360 - protein, 6 aa, Artificial Sequence
  Mutants isolated from Library by panning
RTISIS

SEQ ID NO: 361 - protein, 7 aa, Artificial Sequence
  Mutants isolated from Library by panning
TPHSDWL

SEQ ID NO: 362 - protein, 7 aa, Artificial Sequence
  Mutants isolated from Library by panning
IPHEDWL

SEQ ID NO: 363 - protein, 5 aa, Artificial Sequence
  Mutants isolated from Library by panning
RTREP

SEQ ID NO: 364 - protein, 5 aa, Artificial Sequence
  Mutants isolated from Library by panning
DPPES

SEQ ID NO: 365 - protein, 5 aa, Artificial Sequence
  Mutants isolated from Library by panning
SDPEP

SEQ ID NO: 366 - protein, 5 aa, Artificial Sequence
  Mutants isolated from Library by panning
TSHEN

SEQ ID NO: 367 - protein, 5 aa, Artificial Sequence
  Mutants isolated from Library by panning
SKSEN

SEQ ID NO: 368 - protein, 5 aa, Artificial Sequence
  Mutants isolated from Library by panning
HRSEN

SEQ ID NO: 369 - protein, 5 aa, Artificial Sequence
  Mutants isolated from Library by panning
KIREN

SEQ ID NO: 370 - protein, 5 aa, Artificial Sequence
  Mutants isolated from Library by panning
GITES

SEQ ID NO: 371 - protein, 5 aa, Artificial Sequence
  Mutants isolated from Library by panning
SMAEP

SEQ ID NO: 372 - protein, 9 aa, Artificial Sequence
  Mutants isolated from Library by panning
MHEALRYHH

SEQ ID NO: 373 - protein, 9 aa, Artificial Sequence
  Mutants isolated from Library by panning
MHEALHFHH

SEQ ID NO: 374 - protein, 9 aa, Artificial Sequence
  Mutants isolated from Library by panning
MHEALKFHH

SEQ ID NO: 375 - protein, 9 aa, Artificial Sequence
  Mutants isolated from Library by panning
MHEALSYHR

SEQ ID NO: 376 - protein, 9 aa, Artificial Sequence
  Mutants isolated from Library by panning
THEALHYHT

SEQ ID NO: 377 - protein, 9 aa, Artificial Sequence
  Mutants isolated from Library by panning
MHEALHYHY

SEQ ID NO: 378 - DNA, 54 bp, Artificial Sequence
  Degenerate oligoes used to combine with TAAssDNA template to make Library 1
  misc_feature (1)...(54): N = A, C, G, or T;  S = G or C
catgtgacctcaggsnnsnnsnngatsnnsnnggtgtccttgggttttgggggg

SEQ ID NO: 379 - DNA, 53 bp, Artificial Sequence
  Degenerate oligoes used to combine with TAAssDNA template to make Library 2
  misc_feature (1)...(53): N = A, C, G, or T; S = G or C
gcacttgtactccttgccattsnnccasnnsnngtgsnnsnnggtgaggacgc

SEQ ID NO: 380 - DNA, 38 bp, Artificial Sequence
  Degenerate oligoes used to combine with TAAssDNA template to make Library 3
  misc_feature (1)...(38): N = A, C, G or T; S = G or C
ggtcttgtagttsnnctcsnnsnnsnnattgctctccc

SEQ ID NO: 381 - DNA, 53 bp, Artificial Sequence
  Degenerate oligoes used to combine with TAAssDNA template to make Library 4
  misc_feature (1)...(53): N = A, C, G or T;  S = G or C
ggctcttctgcgtsnngtgsnnsnncagagcctcatgsnncacggagcatgag

SEQ ID NO: 382 - DNA, 45 bp, Artificial Sequence
  site-directed mutagenesis primer
gcatgtgacctcaggttcccgagtgatatagagggtgtccttggg

SEQ ID NO: 383 - DNA, 45 bp, Artificial Sequence
  site-directed mutagenesis primer
cccaaggacaccctctatatcactcgggaacctgaggtcacatgc

SEQ ID NO: 384 - protein, 16 aa, Artificial Sequence
  Amino acid sequence derived from Murine monoclonal antibody and further modified by amino acid substitutions
DIWWDDKGDYNPSLKS

SEQ ID NO: 385 - protein, 16 aa, Artificial Sequence
  Amino acid sequence derived from Murine monoclonal antibody and further modified by amino acid substitutions
DIWWDDKGDYNPSLKD

SEQ ID NO: 386 - protein, 16 aa, Artificial Sequence
  Amino acid sequence derived from Murine monoclonal antibody and further modified by amino acid substitutions
DIWWDDKGHYNPSLKS

SEQ ID NO: 387 - protein, 16 aa, Artificial Sequence
  Amino acid sequence derived from Murine monoclonal antibody and further modified by amino acid substitutions
DIWWDDKGHYNPSLKD

SEQ ID NO: 388 - protein, 16 aa, Artificial Sequence
  Amino acid sequence derived from Murine monoclonal antibody and further modified by amino acid substitutions
DIWWDDKGSYNPSLKS

SEQ ID NO: 389 - protein, 16 aa, Artificial Sequence
  Amino acid sequence derived from Murine monoclonal antibody and further modified by amino acid substitutions
DIWWDDKGSYNPSLKD

SEQ ID NO: 390 - protein, 16 aa, Artificial Sequence
  Amino acid sequence derived from Murine monoclonal antibody and further modified by amino acid substitutions
DIWWDGKGDYNPSLKS

SEQ ID NO: 391 - protein, 16 aa, Artificial Sequence
  Amino acid sequence derived from Murine monoclonal antibody and further modified by amino acid substitutions
DIWWDGKGDYNPSLKD

SEQ ID NO: 392 - protein, 16 aa, Artificial Sequence
  Amino acid sequence derived from Murine monoclonal antibody and further modified by amino acid substitutions
DIWWDGKGHYNPSLKS

SEQ ID NO: 393 - protein, 16 aa, Artificial Sequence
  Amino acid sequence derived from Murine monoclonal antibody and further modified by amino acid substitutions
DIWWDGKGHYNPSLKD

SEQ ID NO: 394 - protein, 16 aa, Artificial Sequence
  Amino acid sequence derived from Murine monoclonal antibody and further modified by amino acid substitutions
DIWWDGKGSYNPSLKS

SEQ ID NO: 395 - protein, 16 aa, Artificial Sequence
  Amino acid sequence derived from Murine monoclonal antibody and further modified by amino acid substitutions
DIWWDGKGSYNPSLKD

SEQ ID NO: 396 - protein, 10 aa, Artificial Sequence
  Amino acid sequence derived from Murine monoclonal antibody and further modified by amino acid substitutions
KCQLFVGYMH

SEQ ID NO: 397 - protein, 10 aa, Artificial Sequence
  Amino acid sequence derived from Murine monoclonal antibody and further modified by amino acid substitutions
KCQSFVGYMH

SEQ ID NO: 398 - protein, 10 aa, Artificial Sequence
  Amino acid sequence derived from Murine monoclonal antibody and further modified by amino acid substitutions
KCQVSVGYMH

SEQ ID NO: 399 - protein, 10 aa, Artificial Sequence
  Amino acid sequence derived from Murine monoclonal antibody and further modified by amino acid substitutions
KCQVRVGYMH

SEQ ID NO: 400 - protein, 10 aa, Artificial Sequence
  Amino acid sequence derived from Murine monoclonal antibody and further modified by amino acid substitutions
KCQVFVGYMH

SEQ ID NO: 401 - protein, 10 aa, Artificial Sequence
  Amino acid sequence derived from Murine monoclonal antibody and further modified by amino acid substitutions
KCSLFVGYMH

SEQ ID NO: 402 - protein, 10 aa, Artificial Sequence
  Amino acid sequence derived from Murine monoclonal antibody and further modified by amino acid substitutions
KCSSFVGYMH

SEQ ID NO: 403 - protein, 10 aa, Artificial Sequence
  Amino acid sequence derived from Murine monoclonal antibody and further modified by amino acid substitutions
KCSVSVGYMH

SEQ ID NO: 404 - protein, 10 aa, Artificial Sequence
  Amino acid sequence derived from Murine monoclonal antibody and further modified by amino acid substitutions
KCSVRVGYMH

SEQ ID NO: 405 - protein, 10 aa, Artificial Sequence
  Amino acid sequence derived from Murine monoclonal antibody and further modified by amino acid substitutions
KCSVFVGYMH

SEQ ID NO: 406 - protein, 10 aa, Artificial Sequence
  Amino acid sequence derived from Murine monoclonal antibody and further modified by amino acid substitutions
KAQLFVGYMH

SEQ ID NO: 407 - protein, 10 aa, Artificial Sequence
  Amino acid sequence derived from Murine monoclonal antibody and further modified by amino acid substitutions
KAQSFVGYMH

SEQ ID NO: 408 - protein, 10 aa, Artificial Sequence
  Amino acid sequence derived from Murine monoclonal antibody and further modified by amino acid substitutions
KAQVSVGYMH

SEQ ID NO: 409 - protein, 10 aa, Artificial Sequence
  Amino acid sequence derived from Murine monoclonal antibody and further modified by amino acid substitutions
KAQVRVGYMH

SEQ ID NO: 410 - protein, 10 aa, Artificial Sequence
  Amino acid sequence derived from Murine monoclonal antibody and further modified by amino acid substitutions
KAQVFVGYMH

SEQ ID NO: 411 - protein, 10 aa, Artificial Sequence
  Amino acid sequence derived from Murine monoclonal antibody and further modified by amino acid substitutions
KASLFVGYMH

SEQ ID NO: 412 - protein, 10 aa, Artificial Sequence
  Amino acid sequence derived from Murine monoclonal antibody and further modified by amino acid substitutions
KASSFVGYMH

SEQ ID NO: 413 - protein, 10 aa, Artificial Sequence
  Amino acid sequence derived from Murine monoclonal antibody and further modified by amino acid substitutions
KASVSVGYMH

SEQ ID NO: 414 - protein, 10 aa, Artificial Sequence
  Amino acid sequence derived from Murine monoclonal antibody and further modified by amino acid substitutions
KASVRVGYMH

SEQ ID NO: 415 - protein, 10 aa, Artificial Sequence
  Amino acid sequence derived from Murine monoclonal antibody and further modified by amino acid substitutions
KASVFVGYMH

SEQ ID NO: 416 - protein, 10 aa, Artificial Sequence
  Amino acid sequence derived from Murine monoclonal antibody and further modified by amino acid substitutions
KLQLFVGYMH

SEQ ID NO: 417 - protein, 10 aa, Artificial Sequence
  Amino acid sequence derived from Murine monoclonal antibody and further modified by amino acid substitutions
KLQSFVGYMH

SEQ ID NO: 418 - protein, 10 aa, Artificial Sequence
  Amino acid sequence derived from Murine monoclonal antibody and further modified by amino acid substitutions
KLQVSVGYMH

SEQ ID NO: 419 - protein, 10 aa, Artificial Sequence
  Amino acid sequence derived from Murine monoclonal antibody and further modified by amino acid substitutions
KLQVRVGYMH

SEQ ID NO: 420 - protein, 10 aa, Artificial Sequence
  Amino acid sequence derived from Murine monoclonal antibody and further modified by amino acid substitutions
KLQVFVGYMH

SEQ ID NO: 421 - protein, 10 aa, Artificial Sequence
  Amino acid sequence derived from Murine monoclonal antibody and further modified by amino acid substitutions
KLSLFVGYMH

SEQ ID NO: 422 - protein, 10 aa, Artificial Sequence
  Amino acid sequence derived from Murine monoclonal antibody and further modified by amino acid substitutions
KLSSFVGYMH

SEQ ID NO: 423 - protein, 10 aa, Artificial Sequence
  Amino acid sequence derived from Murine monoclonal antibody and further modified by amino acid substitutions
KLSVSVGYMH

SEQ ID NO: 424 - protein, 10 aa, Artificial Sequence
  Amino acid sequence derived from Murine monoclonal antibody and further modified by amino acid substitutions
KLSVRVGYMH

SEQ ID NO: 425 - protein, 10 aa, Artificial Sequence
  Amino acid sequence derived from Murine monoclonal antibody and further modified by amino acid substitutions
KLSVFVGYMH

SEQ ID NO: 426 - protein, 10 aa, Artificial Sequence
  Amino acid sequence derived from Murine monoclonal antibody and further modified by amino acid substitutions
KPQLFVGYMH

SEQ ID NO: 427 - protein, 10 aa, Artificial Sequence
  Amino acid sequence derived from Murine monoclonal antibody and further modified by amino acid substitutions
KPQSFVGYMH

SEQ ID NO: 428 - protein, 10 aa, Artificial Sequence
  Amino acid sequence derived from Murine monoclonal antibody and further modified by amino acid substitutions
KPQVSVGYMH

SEQ ID NO: 429 - protein, 10 aa, Artificial Sequence
  Amino acid sequence derived from Murine monoclonal antibody and further modified by amino acid substitutions
KPQVRVGYMH

SEQ ID NO: 430 - protein, 10 aa, Artificial Sequence
  Amino acid sequence derived from Murine monoclonal antibody and further modified by amino acid substitutions
KPQVFVGYMH

SEQ ID NO: 431 - protein, 10 aa, Artificial Sequence
  Amino acid sequence derived from Murine monoclonal antibody and further modified by amino acid substitutions
KPSLFVGYMH

SEQ ID NO: 432 - protein, 10 aa, Artificial Sequence
  Amino acid sequence derived from Murine monoclonal antibody and further modified by amino acid substitutions
KPSSFVGYMH

SEQ ID NO: 433 - protein, 10 aa, Artificial Sequence
  Amino acid sequence derived from Murine monoclonal antibody and further modified by amino acid substitutions
KPSVSVGYMH

SEQ ID NO: 434 - protein, 10 aa, Artificial Sequence
  Amino acid sequence derived from Murine monoclonal antibody and further modified by amino acid substitutions
KPSVRVGYMH

SEQ ID NO: 435 - protein, 10 aa, Artificial Sequence
  Amino acid sequence derived from Murine monoclonal antibody and further modified by amino acid substitutions
KPSVFVGYMH

SEQ ID NO: 436 - protein, 10 aa, Artificial Sequence
  Amino acid sequence derived from Murine monoclonal antibody and further modified by amino acid substitutions
SCQLFVGYMH

SEQ ID NO: 437 - protein, 10 aa, Artificial Sequence
  Amino acid sequence derived from Murine monoclonal antibody and further modified by amino acid substitutions
SCQSFVGYMH

SEQ ID NO: 438 - protein, 10 aa, Artificial Sequence
  Amino acid sequence derived from Murine monoclonal antibody and further modified by amino acid substitutions
SCQVSVGYMH

SEQ ID NO: 439 - protein, 10 aa, Artificial Sequence
  Amino acid sequence derived from Murine monoclonal antibody and further modified by amino acid substitutions
SCQVRVGYMH

SEQ ID NO: 440 - protein, 10 aa, Artificial Sequence
  Amino acid sequence derived from Murine monoclonal antibody and further modified by amino acid substitutions
SCQVFVGYMH

SEQ ID NO: 441 - protein, 10 aa, Artificial Sequence
  Amino acid sequence derived from Murine monoclonal antibody and further modified by amino acid substitutions
SCSLFVGYMH

SEQ ID NO: 442 - protein, 10 aa, Artificial Sequence
  Amino acid sequence derived from Murine monoclonal antibody and further modified by amino acid substitutions
SCSSFVGYMH

SEQ ID NO: 443 - protein, 10 aa, Artificial Sequence
  Amino acid sequence derived from Murine monoclonal antibody and further modified by amino acid substitutions
SCSVSVGYMH

SEQ ID NO: 444 - protein, 10 aa, Artificial Sequence
  Amino acid sequence derived from Murine monoclonal antibody and further modified by amino acid substitutions
SCSVRVGYMH

SEQ ID NO: 445 - protein, 10 aa, Artificial Sequence
  Amino acid sequence derived from Murine monoclonal antibody and further modified by amino acid substitutions
SCSVFVGYMH

SEQ ID NO: 446 - protein, 10 aa, Artificial Sequence
  Amino acid sequence derived from Murine monoclonal antibody and further modified by amino acid substitutions
SAQLFVGYMH

SEQ ID NO: 447 - protein, 10 aa, Artificial Sequence
  Amino acid sequence derived from Murine monoclonal antibody and further modified by amino acid substitutions
SAQSFVGYMH

SEQ ID NO: 448 - protein, 10 aa, Artificial Sequence
  Amino acid sequence derived from Murine monoclonal antibody and further modified by amino acid substitutions
SAQVSVGYMH

SEQ ID NO: 449 - protein, 10 aa, Artificial Sequence
  Amino acid sequence derived from Murine monoclonal antibody and further modified by amino acid substitutions
SAQVRVGYMH

SEQ ID NO: 450 - protein, 10 aa, Artificial Sequence
  Amino acid sequence derived from Murine monoclonal antibody and further modified by amino acid substitutions
SAQVFVGYMH

SEQ ID NO: 451 - protein, 10 aa, Artificial Sequence
  Amino acid sequence derived from Murine monoclonal antibody and further modified by amino acid substitutions
SASLFVGYMH

SEQ ID NO: 452 - protein, 10 aa, Artificial Sequence
  Amino acid sequence derived from Murine monoclonal antibody and further modified by amino acid substitutions
SASSFVGYMH

SEQ ID NO: 453 - protein, 10 aa, Artificial Sequence
  Amino acid sequence derived from Murine monoclonal antibody and further modified by amino acid substitutions
SASVSVGYMH

SEQ ID NO: 454 - protein, 10 aa, Artificial Sequence
  Amino acid sequence derived from Murine monoclonal antibody and further modified by amino acid substitutions
SASVRVGYMH

SEQ ID NO: 455 - protein, 10 aa, Artificial Sequence
  Amino acid sequence derived from Murine monoclonal antibody and further modified by amino acid substitutions
SASVFVGYMH

SEQ ID NO: 456 - protein, 10 aa, Artificial Sequence
  Amino acid sequence derived from Murine monoclonal antibody and further modified by amino acid substitutions
SLQLFVGYMH

SEQ ID NO: 457 - protein, 10 aa, Artificial Sequence
  Amino acid sequence derived from Murine monoclonal antibody and further modified by amino acid substitutions
SLQSFVGYMH

SEQ ID NO: 458 - protein, 10 aa, Artificial Sequence
  Amino acid sequence derived from Murine monoclonal antibody and further modified by amino acid substitutions
SLQVSVGYMH

SEQ ID NO: 459 - protein, 10 aa, Artificial Sequence
  Amino acid sequence derived from Murine monoclonal antibody and further modified by amino acid substitutions
SLQVRVGYMH

SEQ ID NO: 460 - protein, 10 aa, Artificial Sequence
  Amino acid sequence derived from Murine monoclonal antibody and further modified by amino acid substitutions
SLQVFVGYMH

SEQ ID NO: 461 - protein, 10 aa, Artificial Sequence
  Amino acid sequence derived from Murine monoclonal antibody and further modified by amino acid substitutions
SLSLFVGYMH

SEQ ID NO: 462 - protein, 10 aa, Artificial Sequence
  Amino acid sequence derived from Murine monoclonal antibody and further modified by amino acid substitutions
SLSSFVGYMH

SEQ ID NO: 463 - protein, 10 aa, Artificial Sequence
  Amino acid sequence derived from Murine monoclonal antibody and further modified by amino acid substitutions
SLSVSVGYMH

SEQ ID NO: 464 - protein, 10 aa, Artificial Sequence
  Amino acid sequence derived from Murine monoclonal antibody and further modified by amino acid substitutions
SLSVRVGYMH

SEQ ID NO: 465 - protein, 10 aa, Artificial Sequence
  Amino acid sequence derived from Murine monoclonal antibody and further modified by amino acid substitutions
SLSVFVGYMH

SEQ ID NO: 466 - protein, 10 aa, Artificial Sequence
  Amino acid sequence derived from Murine monoclonal antibody and further modified by amino acid substitutions
SPQLFVGYMH

SEQ ID NO: 467 - protein, 10 aa, Artificial Sequence
  Amino acid sequence derived from Murine monoclonal antibody and further modified by amino acid substitutions
SPQSFVGYMH

SEQ ID NO: 468 - protein, 10 aa, Artificial Sequence
  Amino acid sequence derived from Murine monoclonal antibody and further modified by amino acid substitutions
SPQVSVGYMH

SEQ ID NO: 469 - protein, 10 aa, Artificial Sequence
  Amino acid sequence derived from Murine monoclonal antibody and further modified by amino acid substitutions
SPQVRVGYMH

SEQ ID NO: 470 - protein, 10 aa, Artificial Sequence
  Amino acid sequence derived from Murine monoclonal antibody and further modified by amino acid substitutions
SPQVFVGYMH

SEQ ID NO: 471 - protein, 10 aa, Artificial Sequence
  Amino acid sequence derived from Murine monoclonal antibody and further modified by amino acid substitutions
SPSLFVGYMH

SEQ ID NO: 472 - protein, 10 aa, Artificial Sequence
  Amino acid sequence derived from Murine monoclonal antibody and further modified by amino acid substitutions
SPSSFVGYMH

SEQ ID NO: 473 - protein, 10 aa, Artificial Sequence
  Amino acid sequence derived from Murine monoclonal antibody and further modified by amino acid substitutions
SPSVSVGYMH

SEQ ID NO: 474 - protein, 10 aa, Artificial Sequence
  Amino acid sequence derived from Murine monoclonal antibody and further modified by amino acid substitutions
SPSVRVGYMH

SEQ ID NO: 475 - protein, 10 aa, Artificial Sequence
  Amino acid sequence derived from Murine monoclonal antibody and further modified by amino acid substitutions
SPSVFVGYMH

SEQ ID NO: 476 - protein, 10 aa, Artificial Sequence
  Amino acid sequence derived from Murine monoclonal antibody and further modified by amino acid substitutions
LCQLFVGYMH

SEQ ID NO: 477 - protein, 10 aa, Artificial Sequence
  Amino acid sequence derived from Murine monoclonal antibody and further modified by amino acid substitutions
LCQSFVGYMH

SEQ ID NO: 478 - protein, 10 aa, Artificial Sequence
  Amino acid sequence derived from Murine monoclonal antibody and further modified by amino acid substitutions
LCQVSVGYMH

SEQ ID NO: 479 - protein, 10 aa, Artificial Sequence
  Amino acid sequence derived from Murine monoclonal antibody and further modified by amino acid substitutions
LCQVRVGYMH

SEQ ID NO: 480 - protein, 10 aa, Artificial Sequence
  Amino acid sequence derived from Murine monoclonal antibody and further modified by amino acid substitutions
LCQVFVGYMH

SEQ ID NO: 481 - protein, 10 aa, Artificial Sequence
  Amino acid sequence derived from Murine monoclonal antibody and further modified by amino acid substitutions
LCSLFVGYMH

SEQ ID NO: 482 - protein, 10 aa, Artificial Sequence
  Amino acid sequence derived from Murine monoclonal antibody and further modified by amino acid substitutions
LCSSFVGYMH

SEQ ID NO: 483 - protein, 10 aa, Artificial Sequence
  Amino acid sequence derived from Murine monoclonal antibody and further modified by amino acid substitutions
LCSVSVGYMH

SEQ ID NO: 484 - protein, 10 aa, Artificial Sequence
  Amino acid sequence derived from Murine monoclonal antibody and further modified by amino acid substitutions
LCSVRVGYMH

SEQ ID NO: 485 - protein, 10 aa, Artificial Sequence
  Amino acid sequence derived from Murine monoclonal antibody and further modified by amino acid substitutions
LCSVFVGYMH

SEQ ID NO: 486 - protein, 10 aa, Artificial Sequence
  Amino acid sequence derived from Murine monoclonal antibody and further modified by amino acid substitutions
LAQLSVGYMH

SEQ ID NO: 487 - protein, 10 aa, Artificial Sequence
  Amino acid sequence derived from Murine monoclonal antibody and further modified by amino acid substitutions
LAQLRVGYMH

SEQ ID NO: 488 - protein, 10 aa, Artificial Sequence
  Amino acid sequence derived from Murine monoclonal antibody and further modified by amino acid substitutions
LAQLFVGYMH

SEQ ID NO: 489 - protein, 10 aa, Artificial Sequence
  Amino acid sequence derived from Murine monoclonal antibody and further modified by amino acid substitutions
LAQSSVGYMH

SEQ ID NO: 490 - protein, 10 aa, Artificial Sequence
  Amino acid sequence derived from Murine monoclonal antibody and further modified by amino acid substitutions
LAQSRVGYMH

SEQ ID NO: 491 - protein, 10 aa, Artificial Sequence
  Amino acid sequence derived from Murine monoclonal antibody and further modified by amino acid substitutions
LAQSFVGYMH

SEQ ID NO: 492 - protein, 10 aa, Artificial Sequence
  Amino acid sequence derived from Murine monoclonal antibody and further modified by amino acid substitutions
LAQVSVGYMH

SEQ ID NO: 493 - protein, 10 aa, Artificial Sequence
  Amino acid sequence derived from Murine monoclonal antibody and further modified by amino acid substitutions
LAQVRVGYMH

SEQ ID NO: 494 - protein, 10 aa, Artificial Sequence
  Amino acid sequence derived from Murine monoclonal antibody and further modified by amino acid substitutions
LAQVFVGYMH

SEQ ID NO: 495 - protein, 10 aa, Artificial Sequence
  Amino acid sequence derived from Murine monoclonal antibody and further modified by amino acid substitutions
LASLSVGYMH

SEQ ID NO: 496 - protein, 10 aa, Artificial Sequence
  Amino acid sequence derived from Murine monoclonal antibody and further modified by amino acid substitutions
LASLRVGYMH

SEQ ID NO: 497 - protein, 10 aa, Artificial Sequence
  Amino acid sequence derived from Murine monoclonal antibody and further modified by amino acid substitutions
LASLFVGYMH

SEQ ID NO: 498 - protein, 10 aa, Artificial Sequence
  Amino acid sequence derived from Murine monoclonal antibody and further modified by amino acid substitutions
LASSSVGYMH

SEQ ID NO: 499 - protein, 10 aa, Artificial Sequence
  Amino acid sequence derived from Murine monoclonal antibody and further modified by amino acid substitutions
LASSRVGYMH

SEQ ID NO: 500 - protein, 10 aa, Artificial Sequence
  Amino acid sequence derived from Murine monoclonal antibody and further modified by amino acid substitutions
LASSFVGYMH

SEQ ID NO: 501 - protein, 10 aa, Artificial Sequence
  Amino acid sequence derived from Murine monoclonal antibody and further modified by amino acid substitutions
LASVSVGYMH

SEQ ID NO: 502 - protein, 10 aa, Artificial Sequence
  Amino acid sequence derived from Murine monoclonal antibody and further modified by amino acid substitutions
LASVRVGYMH

SEQ ID NO: 503 - protein, 10 aa, Artificial Sequence
  Amino acid sequence derived from Murine monoclonal antibody and further modified by amino acid substitutions
LASVFVGYMH

SEQ ID NO: 504 - protein, 10 aa, Artificial Sequence
  Amino acid sequence derived from Murine monoclonal antibody and further modified by amino acid substitutions
LLQLSVGYMH

SEQ ID NO: 505 - protein, 10 aa, Artificial Sequence
  Amino acid sequence derived from Murine monoclonal antibody and further modified by amino acid substitutions
LLQLRVGYMH

SEQ ID NO: 506 - protein, 10 aa, Artificial Sequence
  Amino acid sequence derived from Murine monoclonal antibody and further modified by amino acid substitutions
LLQLFVGYMH

SEQ ID NO: 507 - protein, 10 aa, Artificial Sequence
  Amino acid sequence derived from Murine monoclonal antibody and further modified by amino acid substitutions
LLQSSVGYMH

SEQ ID NO: 508 - protein, 10 aa, Artificial Sequence
  Amino acid sequence derived from Murine monoclonal antibody and further modified by amino acid substitutions
LLQSRVGYMH

SEQ ID NO: 509 - protein, 10 aa, Artificial Sequence
  Amino acid sequence derived from Murine monoclonal antibody and further modified by amino acid substitutions
LLQSFVGYMH

SEQ ID NO: 510 - protein, 10 aa, Artificial Sequence
  Amino acid sequence derived from Murine monoclonal antibody and further modified by amino acid substitutions
LLQVSVGYMH

SEQ ID NO: 511 - protein, 10 aa, Artificial Sequence
  Amino acid sequence derived from Murine monoclonal antibody and further modified by amino acid substitutions
LLQVRVGYMH

SEQ ID NO: 512 - protein, 10 aa, Artificial Sequence
  Amino acid sequence derived from Murine monoclonal antibody and further modified by amino acid substitutions
LLQVFVGYMH

SEQ ID NO: 513 - protein, 10 aa, Artificial Sequence
  Amino acid sequence derived from Murine monoclonal antibody and further modified by amino acid substitutions
LLSLSVGYMH

SEQ ID NO: 514 - protein, 10 aa, Artificial Sequence
  Amino acid sequence derived from Murine monoclonal antibody and further modified by amino acid substitutions
LLSLRVGYMH

SEQ ID NO: 515 - protein, 10 aa, Artificial Sequence
  Amino acid sequence derived from Murine monoclonal antibody and further modified by amino acid substitutions
LLSLFVGYMH

SEQ ID NO: 516 - protein, 10 aa, Artificial Sequence
  Amino acid sequence derived from Murine monoclonal antibody and further modified by amino acid substitutions
LLSSSVGYMH

SEQ ID NO: 517 - protein, 10 aa, Artificial Sequence
  Amino acid sequence derived from Murine monoclonal antibody and further modified by amino acid substitutions
LLSSRVGYMH

SEQ ID NO: 518 - protein, 10 aa, Artificial Sequence
  Amino acid sequence derived from Murine monoclonal antibody and further modified by amino acid substitutions
LLSSFVGYMH

SEQ ID NO: 519 - protein, 10 aa, Artificial Sequence
  Amino acid sequence derived from Murine monoclonal antibody and further modified by amino acid substitutions
LLSVSVGYMH

SEQ ID NO: 520 - protein, 10 aa, Artificial Sequence
  Amino acid sequence derived from Murine monoclonal antibody and further modified by amino acid substitutions
LLSVRVGYMH

SEQ ID NO: 521 - protein, 10 aa, Artificial Sequence
  Amino acid sequence derived from Murine monoclonal antibody and further modified by amino acid substitutions
LLSVFVGYMH

SEQ ID NO: 522 - protein, 10 aa, Artificial Sequence
  Amino acid sequence derived from Murine monoclonal antibody and further modified by amino acid substitutions
LPQLFVGYMH

SEQ ID NO: 523 - protein, 10 aa, Artificial Sequence
  Amino acid sequence derived from Murine monoclonal antibody and further modified by amino acid substitutions
LPQSFVGYMH

SEQ ID NO: 524 - protein, 10 aa, Artificial Sequence
  Amino acid sequence derived from Murine monoclonal antibody and further modified by amino acid substitutions
LPQVSVGYMH

SEQ ID NO: 525 - protein, 10 aa, Artificial Sequence
  Amino acid sequence derived from Murine monoclonal antibody and further modified by amino acid substitutions
LPQVRVGYMH

SEQ ID NO: 526 - protein, 10 aa, Artificial Sequence
  Amino acid sequence derived from Murine monoclonal antibody and further modified by amino acid substitutions
LPQVFVGYMH

SEQ ID NO: 527 - protein, 10 aa, Artificial Sequence
  Amino acid sequence derived from Murine monoclonal antibody and further modified by amino acid substitutions
LPSLFVGYMH

SEQ ID NO: 528 - protein, 10 aa, Artificial Sequence
  Amino acid sequence derived from Murine monoclonal antibody and further modified by amino acid substitutions
LPSSFVGYMH

SEQ ID NO: 529 - protein, 10 aa, Artificial Sequence
  Amino acid sequence derived from Murine monoclonal antibody and further modified by amino acid substitutions
LPSVSVGYMH

SEQ ID NO: 530 - protein, 10 aa, Artificial Sequence
  Amino acid sequence derived from Murine monoclonal antibody and further modified by amino acid substitutions
LPSVRVGYMH

SEQ ID NO: 531 - protein, 10 aa, Artificial Sequence
  Amino acid sequence derived from Murine monoclonal antibody and further modified by amino acid substitutions
LPSVFVGYMH

SEQ ID NO: 532 - protein, 7 aa, Artificial Sequence
  Amino acid sequence derived from Murine monoclonal antibody and further modified by amino acid substitutions
DTSKLKS

SEQ ID NO: 533 - protein, 7 aa, Artificial Sequence
  Amino acid sequence derived from Murine monoclonal antibody and further modified by amino acid substitutions
DTSKLRS

SEQ ID NO: 534 - protein, 7 aa, Artificial Sequence
  Amino acid sequence derived from Murine monoclonal antibody and further modified by amino acid substitutions
DTSKLHS

SEQ ID NO: 535 - protein, 7 aa, Artificial Sequence
  Amino acid sequence derived from Murine monoclonal antibody and further modified by amino acid substitutions
DTSKLTS

SEQ ID NO: 536 - protein, 7 aa, Artificial Sequence
  Amino acid sequence derived from Murine monoclonal antibody and further modified by amino acid substitutions
DTSKHAS

SEQ ID NO: 537 - protein, 7 aa, Artificial Sequence
  Amino acid sequence derived from Murine monoclonal antibody and further modified by amino acid substitutions
DTSKHSS

SEQ ID NO: 538 - protein, 7 aa, Artificial Sequence
  Amino acid sequence derived from Murine monoclonal antibody and further modified by amino acid substitutions
DTSKHKS

SEQ ID NO: 539 - protein, 7 aa, Artificial Sequence
  Amino acid sequence derived from Murine monoclonal antibody and further modified by amino acid substitutions
DTSKHRS

SEQ ID NO: 540 - protein, 7 aa, Artificial Sequence
  Amino acid sequence derived from Murine monoclonal antibody and further modified by amino acid substitutions
DTSKHHS

SEQ ID NO: 541 - protein, 7 aa, Artificial Sequence
  Amino acid sequence derived from Murine monoclonal antibody and further modified by amino acid substitutions
DTSKHPS

SEQ ID NO: 542 - protein, 7 aa, Artificial Sequence
  Amino acid sequence derived from Murine monoclonal antibody and further modified by amino acid substitutions
DTSKHTS

SEQ ID NO: 543 - protein, 7 aa, Artificial Sequence
  Amino acid sequence derived from Murine monoclonal antibody and further modified by amino acid substitutions
DTSKHDS

SEQ ID NO: 544 - protein, 7 aa, Artificial Sequence
  Amino acid sequence derived from Murine monoclonal antibody and further modified by amino acid substitutions
DTSKQKS

SEQ ID NO: 545 - protein, 7 aa, Artificial Sequence
  Amino acid sequence derived from Murine monoclonal antibody and further modified by amino acid substitutions
DTSKQRS

SEQ ID NO: 546 - protein, 7 aa, Artificial Sequence
  Amino acid sequence derived from Murine monoclonal antibody and further modified by amino acid substitutions
DTSKQHS

SEQ ID NO: 547 - protein, 7 aa, Artificial Sequence
  Amino acid sequence derived from Murine monoclonal antibody and further modified by amino acid substitutions
DTSKQPS

SEQ ID NO: 548 - protein, 7 aa, Artificial Sequence
  Amino acid sequence derived from Murine monoclonal antibody and further modified by amino acid substitutions
DTSKQTS

SEQ ID NO: 549 - protein, 7 aa, Artificial Sequence
  Amino acid sequence derived from Murine monoclonal antibody and further modified by amino acid substitutions
DTSKQDS

SEQ ID NO: 550 - protein, 7 aa, Artificial Sequence
  Amino acid sequence derived from Murine monoclonal antibody and further modified by amino acid substitutions
DTSGLSS

SEQ ID NO: 551 - protein, 7 aa, Artificial Sequence
  Amino acid sequence derived from Murine monoclonal antibody and further modified by amino acid substitutions
DTSGLKS

SEQ ID NO: 552 - protein, 7 aa, Artificial Sequence
  Amino acid sequence derived from Murine monoclonal antibody and further modified by amino acid substitutions
DTSGLRS

SEQ ID NO: 553 - protein, 7 aa, Artificial Sequence
  Amino acid sequence derived from Murine monoclonal antibody and further modified by amino acid substitutions
DTSGLHS

SEQ ID NO: 554 - protein, 7 aa, Artificial Sequence
  Amino acid sequence derived from Murine monoclonal antibody and further modified by amino acid substitutions
DTSGLTS

SEQ ID NO: 555 - protein, 7 aa, Artificial Sequence
  Amino acid sequence derived from Murine monoclonal antibody and further modified by amino acid substitutions
DTSGLDS

SEQ ID NO: 556 - protein, 7 aa, Artificial Sequence
  Amino acid sequence derived from Murine monoclonal antibody and further modified by amino acid substitutions
DTSGHAS

SEQ ID NO: 557 - protein, 7 aa, Artificial Sequence
  Amino acid sequence derived from Murine monoclonal antibody and further modified by amino acid substitutions
DTSGHSS

SEQ ID NO: 558 - protein, 7 aa, Artificial Sequence
  Amino acid sequence derived from Murine monoclonal antibody and further modified by amino acid substitutions
DTSGHKS

SEQ ID NO: 559 - protein, 7 aa, Artificial Sequence
  Amino acid sequence derived from Murine monoclonal antibody and further modified by amino acid substitutions
DTSGHRS

SEQ ID NO: 560 - protein, 7 aa, Artificial Sequence
  Amino acid sequence derived from Murine monoclonal antibody and further modified by amino acid substitutions
DTSGHHS

SEQ ID NO: 561 - protein, 7 aa, Artificial Sequence
  Amino acid sequence derived from Murine monoclonal antibody and further modified by amino acid substitutions
DTSGHPS

SEQ ID NO: 562 - protein, 7 aa, Artificial Sequence
  Amino acid sequence derived from Murine monoclonal antibody and further modified by amino acid substitutions
DTSGHTS

SEQ ID NO: 563 - protein, 7 aa, Artificial Sequence
  Amino acid sequence derived from Murine monoclonal antibody and further modified by amino acid substitutions
DTSGHDS

SEQ ID NO: 564 - protein, 7 aa, Artificial Sequence
  Amino acid sequence derived from Murine monoclonal antibody and further modified by amino acid substitutions
DTSGQAS

SEQ ID NO: 565 - protein, 7 aa, Artificial Sequence
  Amino acid sequence derived from Murine monoclonal antibody and further modified by amino acid substitutions
DTSGQSS

SEQ ID NO: 566 - protein, 7 aa, Artificial Sequence
  Amino acid sequence derived from Murine monoclonal antibody and further modified by amino acid substitutions
DTSGQKS

SEQ ID NO: 567 - protein, 7 aa, Artificial Sequence
  Amino acid sequence derived from Murine monoclonal antibody and further modified by amino acid substitutions
DTSGQRS

SEQ ID NO: 568 - protein, 7 aa, Artificial Sequence
  Amino acid sequence derived from Murine monoclonal antibody and further modified by amino acid substitutions
DTSGQHS

SEQ ID NO: 569 - protein, 7 aa, Artificial Sequence
  Amino acid sequence derived from Murine monoclonal antibody and further modified by amino acid substitutions
DTSGQPS

SEQ ID NO: 570 - protein, 7 aa, Artificial Sequence
  Amino acid sequence derived from Murine monoclonal antibody and further modified by amino acid substitutions
DTSGQTS

SEQ ID NO: 571 - protein, 7 aa, Artificial Sequence
  Amino acid sequence derived from Murine monoclonal antibody and further modified by amino acid substitutions
DTSGQDS

SEQ ID NO: 572 - protein, 7 aa, Artificial Sequence
  Amino acid sequence derived from Murine monoclonal antibody and further modified by amino acid substitutions
DTSRLSS

SEQ ID NO: 573 - protein, 7 aa, Artificial Sequence
  Amino acid sequence derived from Murine monoclonal antibody and further modified by amino acid substitutions
DTSRLKS

SEQ ID NO: 574 - protein, 7 aa, Artificial Sequence
  Amino acid sequence derived from Murine monoclonal antibody and further modified by amino acid substitutions
DTSRLRS

SEQ ID NO: 575 - protein, 7 aa, Artificial Sequence
  Amino acid sequence derived from Murine monoclonal antibody and further modified by amino acid substitutions
DTSRLHS

SEQ ID NO: 576 - protein, 7 aa, Artificial Sequence
  Amino acid sequence derived from Murine monoclonal antibody and further modified by amino acid substitutions
DTSRLPS

SEQ ID NO: 577 - protein, 7 aa, Artificial Sequence
  Amino acid sequence derived from Murine monoclonal antibody and further modified by amino acid substitutions
DTSRLTS

SEQ ID NO: 578 - protein, 7 aa, Artificial Sequence
  Amino acid sequence derived from Murine monoclonal antibody and further modified by amino acid substitutions
DTSRLDS

SEQ ID NO: 579 - protein, 7 aa, Artificial Sequence
  Amino acid sequence derived from Murine monoclonal antibody and further modified by amino acid substitutions
DTSRHAS

SEQ ID NO: 580 - protein, 7 aa, Artificial Sequence
  Amino acid sequence derived from Murine monoclonal antibody and further modified by amino acid substitutions
DTSRHSS

SEQ ID NO: 581 - protein, 7 aa, Artificial Sequence
  Amino acid sequence derived from Murine monoclonal antibody and further modified by amino acid substitutions
DTSRHKS

SEQ ID NO: 582 - protein, 7 aa, Artificial Sequence
  Amino acid sequence derived from Murine monoclonal antibody and further modified by amino acid substitutions
DTSRHRS

SEQ ID NO: 583 - protein, 7 aa, Artificial Sequence
  Amino acid sequence derived from Murine monoclonal antibody and further modified by amino acid substitutions
DTSRHHS

SEQ ID NO: 584 - protein, 7 aa, Artificial Sequence
  Amino acid sequence derived from Murine monoclonal antibody and further modified by amino acid substitutions
DTSRHPS

SEQ ID NO: 585 - protein, 7 aa, Artificial Sequence
  Amino acid sequence derived from Murine monoclonal antibody and further modified by amino acid substitutions
DTSRHTS

SEQ ID NO: 586 - protein, 7 aa, Artificial Sequence
  Amino acid sequence derived from Murine monoclonal antibody and further modified by amino acid substitutions
DTSRHDS

SEQ ID NO: 587 - protein, 7 aa, Artificial Sequence
  Amino acid sequence derived from Murine monoclonal antibody and further modified by amino acid substitutions
DTSRQAS

SEQ ID NO: 588 - protein, 7 aa, Artificial Sequence
  Amino acid sequence derived from Murine monoclonal antibody and further modified by amino acid substitutions
DTSRQSS

SEQ ID NO: 589 - protein, 7 aa, Artificial Sequence
  Amino acid sequence derived from Murine monoclonal antibody and further modified by amino acid substitutions
DTSRQKS

SEQ ID NO: 590 - protein, 7 aa, Artificial Sequence
  Amino acid sequence derived from Murine monoclonal antibody and further modified by amino acid substitutions
DTSRQRS

SEQ ID NO: 591 - protein, 7 aa, Artificial Sequence
  Amino acid sequence derived from Murine monoclonal antibody and further modified by amino acid substitutions
DTSRQHS

SEQ ID NO: 592 - protein, 7 aa, Artificial Sequence
  Amino acid sequence derived from Murine monoclonal antibody and further modified by amino acid substitutions
DTSRQPS

SEQ ID NO: 593 - protein, 7 aa, Artificial Sequence
  Amino acid sequence derived from Murine monoclonal antibody and further modified by amino acid substitutions
DTSRQTS

SEQ ID NO: 594 - protein, 7 aa, Artificial Sequence
  Amino acid sequence derived from Murine monoclonal antibody and further modified by amino acid substitutions
DTSRQDS

SEQ ID NO: 595 - protein, 7 aa, Artificial Sequence
  Amino acid sequence derived from Murine monoclonal antibody and further modified by amino acid substitutions
DTSYLKS

SEQ ID NO: 596 - protein, 7 aa, Artificial Sequence
  Amino acid sequence derived from Murine monoclonal antibody and further modified by amino acid substitutions
DTSYLRS

SEQ ID NO: 597 - protein, 7 aa, Artificial Sequence
  Amino acid sequence derived from Murine monoclonal antibody and further modified by amino acid substitutions
DTSYLHS

SEQ ID NO: 598 - protein, 7 aa, Artificial Sequence
  Amino acid sequence derived from Murine monoclonal antibody and further modified by amino acid substitutions
DTSYLPS

SEQ ID NO: 599 - protein, 7 aa, Artificial Sequence
  Amino acid sequence derived from Murine monoclonal antibody and further modified by amino acid substitutions
DTSYLTS

SEQ ID NO: 600 - protein, 7 aa, Artificial Sequence
  Amino acid sequence derived from Murine monoclonal antibody and further modified by amino acid substitutions
DTSYLDS

SEQ ID NO: 601 - protein, 7 aa, Artificial Sequence
  Amino acid sequence derived from Murine monoclonal antibody and further modified by amino acid substitutions
DTSYHAS

SEQ ID NO: 602 - protein, 7 aa, Artificial Sequence
  Amino acid sequence derived from Murine monoclonal antibody and further modified by amino acid substitutions
DTSYHSS

SEQ ID NO: 603 - protein, 7 aa, Artificial Sequence
  Amino acid sequence derived from Murine monoclonal antibody and further modified by amino acid substitutions
DTSYHKS

SEQ ID NO: 604 - protein, 7 aa, Artificial Sequence
  Amino acid sequence derived from Murine monoclonal antibody and further modified by amino acid substitutions
DTSYHRS

SEQ ID NO: 605 - protein, 7 aa, Artificial Sequence
  Amino acid sequence derived from Murine monoclonal antibody and further modified by amino acid substitutions
DTSYHHS

SEQ ID NO: 606 - protein, 7 aa, Artificial Sequence
  Amino acid sequence derived from Murine monoclonal antibody and further modified by amino acid substitutions
DTSYHPS

SEQ ID NO: 607 - protein, 7 aa, Artificial Sequence
  Amino acid sequence derived from Murine monoclonal antibody and further modified by amino acid substitutions
DTSYHTS

SEQ ID NO: 608 - protein, 7 aa, Artificial Sequence
  Amino acid sequence derived from Murine monoclonal antibody and further modified by amino acid substitutions
DTSYHDS

SEQ ID NO: 609 - protein, 7 aa, Artificial Sequence
  Amino acid sequence derived from Murine monoclonal antibody and further modified by amino acid substitutions
DTSYQKS

SEQ ID NO: 610 - protein, 7 aa, Artificial Sequence
  Amino acid sequence derived from Murine monoclonal antibody and further modified by amino acid substitutions
DTSYQRS

SEQ ID NO: 611 - protein, 7 aa, Artificial Sequence
  Amino acid sequence derived from Murine monoclonal antibody and further modified by amino acid substitutions
DTSYQHS

SEQ ID NO: 612 - protein, 7 aa, Artificial Sequence
  Amino acid sequence derived from Murine monoclonal antibody and further modified by amino acid substitutions
DTSYQPS

SEQ ID NO: 613 - protein, 7 aa, Artificial Sequence
  Amino acid sequence derived from Murine monoclonal antibody and further modified by amino acid substitutions
DTSYQTS

SEQ ID NO: 614 - protein, 7 aa, Artificial Sequence
  Amino acid sequence derived from Murine monoclonal antibody and further modified by amino acid substitutions
DTSYQDS

SEQ ID NO: 615 - protein, 7 aa, Artificial Sequence
  Amino acid sequence derived from Murine monoclonal antibody and further modified by amino acid substitutions
DTSFLAS

SEQ ID NO: 616 - protein, 7 aa, Artificial Sequence
  Amino acid sequence derived from Murine monoclonal antibody and further modified by amino acid substitutions
DTSFLSS

SEQ ID NO: 617 - protein, 7 aa, Artificial Sequence
  Amino acid sequence derived from Murine monoclonal antibody and further modified by amino acid substitutions
DTSFLKS

SEQ ID NO: 618 - protein, 7 aa, Artificial Sequence
  Amino acid sequence derived from Murine monoclonal antibody and further modified by amino acid substitutions
DTSFLRS

SEQ ID NO: 619 - protein, 7 aa, Artificial Sequence
  Amino acid sequence derived from Murine monoclonal antibody and further modified by amino acid substitutions
DTSFLHS

SEQ ID NO: 620 - protein, 7 aa, Artificial Sequence
  Amino acid sequence derived from Murine monoclonal antibody and further modified by amino acid substitutions
DTSFLPS

SEQ ID NO: 621 - protein, 7 aa, Artificial Sequence
  Amino acid sequence derived from Murine monoclonal antibody and further modified by amino acid substitutions
DTSFLTS

SEQ ID NO: 622 - protein, 7 aa, Artificial Sequence
  Amino acid sequence derived from Murine monoclonal antibody and further modified by amino acid substitutions
DTSFHAS

SEQ ID NO: 623 - protein, 7 aa, Artificial Sequence
  Amino acid sequence derived from Murine monoclonal antibody and further modified by amino acid substitutions
DTSFHSS

SEQ ID NO: 624 - protein, 7 aa, Artificial Sequence
  Amino acid sequence derived from Murine monoclonal antibody and further modified by amino acid substitutions
DTSFHKS

SEQ ID NO: 625 - protein, 7 aa, Artificial Sequence
  Amino acid sequence derived from Murine monoclonal antibody and further modified by amino acid substitutions
DTSFHRS

SEQ ID NO: 626 - protein, 7 aa, Artificial Sequence
  Amino acid sequence derived from Murine monoclonal antibody and further modified by amino acid substitutions
DTSFHHS

SEQ ID NO: 627 - protein, 7 aa, Artificial Sequence
  Amino acid sequence derived from Murine monoclonal antibody and further modified by amino acid substitutions
DTSFHPS

SEQ ID NO: 628 - protein, 7 aa, Artificial Sequence
  Amino acid sequence derived from Murine monoclonal antibody and further modified by amino acid substitutions
DTSFHTS

SEQ ID NO: 629 - protein, 7 aa, Artificial Sequence
  Amino acid sequence derived from Murine monoclonal antibody and further modified by amino acid substitutions
DTSFHDS

SEQ ID NO: 630 - protein, 7 aa, Artificial Sequence
  Amino acid sequence derived from Murine monoclonal antibody and further modified by amino acid substitutions
DTSFQAS

SEQ ID NO: 631 - protein, 7 aa, Artificial Sequence
  Amino acid sequence derived from Murine monoclonal antibody and further modified by amino acid substitutions
DTSFQSS

SEQ ID NO: 632 - protein, 7 aa, Artificial Sequence
  Amino acid sequence derived from Murine monoclonal antibody and further modified by amino acid substitutions
DTSFQKS

SEQ ID NO: 633 - protein, 7 aa, Artificial Sequence
  Amino acid sequence derived from Murine monoclonal antibody and further modified by amino acid substitutions
DTSFQRS

SEQ ID NO: 634 - protein, 7 aa, Artificial Sequence
  Amino acid sequence derived from Murine monoclonal antibody and further modified by amino acid substitutions
DTSFQHS

SEQ ID NO: 635 - protein, 7 aa, Artificial Sequence
  Amino acid sequence derived from Murine monoclonal antibody and further modified by amino acid substitutions
DTSFQPS

SEQ ID NO: 636 - protein, 7 aa, Artificial Sequence
  Amino acid sequence derived from Murine monoclonal antibody and further modified by amino acid substitutions
DTSFQTS

SEQ ID NO: 637 - protein, 7 aa, Artificial Sequence
  Amino acid sequence derived from Murine monoclonal antibody and further modified by amino acid substitutions
DTSFQDS

SEQ ID NO: 638 - protein, 7 aa, Artificial Sequence
  Amino acid sequence derived from Murine monoclonal antibody and further modified by amino acid substitutions
DTSLLSS

SEQ ID NO: 639 - protein, 7 aa, Artificial Sequence
  Amino acid sequence derived from Murine monoclonal antibody and further modified by amino acid substitutions
DTSLLKS

SEQ ID NO: 640 - protein, 7 aa, Artificial Sequence
  Amino acid sequence derived from Murine monoclonal antibody and further modified by amino acid substitutions
DTSLLRS

SEQ ID NO: 641 - protein, 7 aa, Artificial Sequence
  Amino acid sequence derived from Murine monoclonal antibody and further modified by amino acid substitutions
DTSLLHS

SEQ ID NO: 642 - protein, 7 aa, Artificial Sequence
  Amino acid sequence derived from Murine monoclonal antibody and further modified by amino acid substitutions
DTSLLPS

SEQ ID NO: 643 - protein, 7 aa, Artificial Sequence
  Amino acid sequence derived from Murine monoclonal antibody and further modified by amino acid substitutions
DTSLLTS

SEQ ID NO: 644 - protein, 7 aa, Artificial Sequence
  Amino acid sequence derived from Murine monoclonal antibody and further modified by amino acid substitutions
DTSLHAS

SEQ ID NO: 645 - protein, 7 aa, Artificial Sequence
  Amino acid sequence derived from Murine monoclonal antibody and further modified by amino acid substitutions
DTSLHSS

SEQ ID NO: 646 - protein, 7 aa, Artificial Sequence
  Amino acid sequence derived from Murine monoclonal antibody and further modified by amino acid substitutions
DTSLHKS

SEQ ID NO: 647 - protein, 7 aa, Artificial Sequence
  Amino acid sequence derived from Murine monoclonal antibody and further modified by amino acid substitutions
DTSLHRS

SEQ ID NO: 648 - protein, 7 aa, Artificial Sequence
  Amino acid sequence derived from Murine monoclonal antibody and further modified by amino acid substitutions
DTSLHHS

SEQ ID NO: 649 - protein, 7 aa, Artificial Sequence
  Amino acid sequence derived from Murine monoclonal antibody and further modified by amino acid substitutions
DTSLHPS

SEQ ID NO: 650 - protein, 7 aa, Artificial Sequence
  Amino acid sequence derived from Murine monoclonal antibody and further modified by amino acid substitutions
DTSLHTS

SEQ ID NO: 651 - protein, 7 aa, Artificial Sequence
  Amino acid sequence derived from Murine monoclonal antibody and further modified by amino acid substitutions
DTSLHDS

SEQ ID NO: 652 - protein, 7 aa, Artificial Sequence
  Amino acid sequence derived from Murine monoclonal antibody and further modified by amino acid substitutions
DTSLQAS

SEQ ID NO: 653 - protein, 7 aa, Artificial Sequence
  Amino acid sequence derived from Murine monoclonal antibody and further modified by amino acid substitutions
DTSLQSS

SEQ ID NO: 654 - protein, 7 aa, Artificial Sequence
  Amino acid sequence derived from Murine monoclonal antibody and further modified by amino acid substitutions
DTSLQKS

SEQ ID NO: 655 - protein, 7 aa, Artificial Sequence
  Amino acid sequence derived from Murine monoclonal antibody and further modified by amino acid substitutions
DTSLQRS

SEQ ID NO: 656 - protein, 7 aa, Artificial Sequence
  Amino acid sequence derived from Murine monoclonal antibody and further modified by amino acid substitutions
DTSLQHS

SEQ ID NO: 657 - protein, 7 aa, Artificial Sequence
  Amino acid sequence derived from Murine monoclonal antibody and further modified by amino acid substitutions
DTSLQPS

SEQ ID NO: 658 - protein, 7 aa, Artificial Sequence
  Amino acid sequence derived from Murine monoclonal antibody and further modified by amino acid substitutions
DTSLQTS

SEQ ID NO: 659 - protein, 7 aa, Artificial Sequence
  Amino acid sequence derived from Murine monoclonal antibody and further modified by amino acid substitutions
DTSLQDS

SEQ ID NO: 660 - protein, 7 aa, Artificial Sequence
  Amino acid sequence derived from Murine monoclonal antibody and further modified by amino acid substitutions
DTFKLKS

SEQ ID NO: 661 - protein, 7 aa, Artificial Sequence
  Amino acid sequence derived from Murine monoclonal antibody and further modified by amino acid substitutions
DTFKLRS

SEQ ID NO: 662 - protein, 7 aa, Artificial Sequence
  Amino acid sequence derived from Murine monoclonal antibody and further modified by amino acid substitutions
DTFKLHS

SEQ ID NO: 663 - protein, 7 aa, Artificial Sequence
  Amino acid sequence derived from Murine monoclonal antibody and further modified by amino acid substitutions
DTFKLPS

SEQ ID NO: 664 - protein, 7 aa, Artificial Sequence
  Amino acid sequence derived from Murine monoclonal antibody and further modified by amino acid substitutions
DTFKLTS

SEQ ID NO: 665 - protein, 7 aa, Artificial Sequence
  Amino acid sequence derived from Murine monoclonal antibody and further modified by amino acid substitutions
DTFKLDS

SEQ ID NO: 666 - protein, 7 aa, Artificial Sequence
  Amino acid sequence derived from Murine monoclonal antibody and further modified by amino acid substitutions
DTFKHAS

SEQ ID NO: 667 - protein, 7 aa, Artificial Sequence
  Amino acid sequence derived from Murine monoclonal antibody and further modified by amino acid substitutions
DTFKHSS

SEQ ID NO: 668 - protein, 7 aa, Artificial Sequence
  Amino acid sequence derived from Murine monoclonal antibody and further modified by amino acid substitutions
DTFKHKS

SEQ ID NO: 669 - protein, 7 aa, Artificial Sequence
  Amino acid sequence derived from Murine monoclonal antibody and further modified by amino acid substitutions
DTFKHRS

SEQ ID NO: 670 - protein, 7 aa, Artificial Sequence
  Amino acid sequence derived from Murine monoclonal antibody and further modified by amino acid substitutions
DTFKHHS

SEQ ID NO: 671 - protein, 7 aa, Artificial Sequence
  Amino acid sequence derived from Murine monoclonal antibody and further modified by amino acid substitutions
DTFKHPS

SEQ ID NO: 672 - protein, 7 aa, Artificial Sequence
  Amino acid sequence derived from Murine monoclonal antibody and further modified by amino acid substitutions
DTFKHTS

SEQ ID NO: 673 - protein, 7 aa, Artificial Sequence
  Amino acid sequence derived from Murine monoclonal antibody and further modified by amino acid substitutions
DTFKHDS

SEQ ID NO: 674 - protein, 7 aa, Artificial Sequence
  Amino acid sequence derived from Murine monoclonal antibody and further modified by amino acid substitutions
DTFKQAS

SEQ ID NO: 675 - protein, 7 aa, Artificial Sequence
  Amino acid sequence derived from Murine monoclonal antibody and further modified by amino acid substitutions
DTFKQSS

SEQ ID NO: 676 - protein, 7 aa, Artificial Sequence
  Amino acid sequence derived from Murine monoclonal antibody and further modified by amino acid substitutions
DTFKQKS

SEQ ID NO: 677 - protein, 7 aa, Artificial Sequence
  Amino acid sequence derived from Murine monoclonal antibody and further modified by amino acid substitutions
DTFKQRS

SEQ ID NO: 678 - protein, 7 aa, Artificial Sequence
  Amino acid sequence derived from Murine monoclonal antibody and further modified by amino acid substitutions
DTFKQHS

SEQ ID NO: 679 - protein, 7 aa, Artificial Sequence
  Amino acid sequence derived from Murine monoclonal antibody and further modified by amino acid substitutions
DTFKQPS

SEQ ID NO: 680 - protein, 7 aa, Artificial Sequence
  Amino acid sequence derived from Murine monoclonal antibody and further modified by amino acid substitutions
DTFKQTS

SEQ ID NO: 681 - protein, 7 aa, Artificial Sequence
  Amino acid sequence derived from Murine monoclonal antibody and further modified by amino acid substitutions
DTFKQDS

SEQ ID NO: 682 - protein, 7 aa, Artificial Sequence
  Amino acid sequence derived from Murine monoclonal antibody and further modified by amino acid substitutions
DTFGLAS

SEQ ID NO: 683 - protein, 7 aa, Artificial Sequence
  Amino acid sequence derived from Murine monoclonal antibody and further modified by amino acid substitutions
DTFGLSS

SEQ ID NO: 684 - protein, 7 aa, Artificial Sequence
  Amino acid sequence derived from Murine monoclonal antibody and further modified by amino acid substitutions
DTFGLKS

SEQ ID NO: 685 - protein, 7 aa, Artificial Sequence
  Amino acid sequence derived from Murine monoclonal antibody and further modified by amino acid substitutions
DTFGLRS

SEQ ID NO: 686 - protein, 7 aa, Artificial Sequence
  Amino acid sequence derived from Murine monoclonal antibody and further modified by amino acid substitutions
DTFGLHS

SEQ ID NO: 687 - protein, 7 aa, Artificial Sequence
  Amino acid sequence derived from Murine monoclonal antibody and further modified by amino acid substitutions
DTFGLPS

SEQ ID NO: 688 - protein, 7 aa, Artificial Sequence
  Amino acid sequence derived from Murine monoclonal antibody and further modified by amino acid substitutions
DTFGLTS

SEQ ID NO: 689 - protein, 7 aa, Artificial Sequence
  Amino acid sequence derived from Murine monoclonal antibody and further modified by amino acid substitutions
DTFGLDS

SEQ ID NO: 690 - protein, 7 aa, Artificial Sequence
  Amino acid sequence derived from Murine monoclonal antibody and further modified by amino acid substitutions
DTFGHAS

SEQ ID NO: 691 - protein, 7 aa, Artificial Sequence
  Amino acid sequence derived from Murine monoclonal antibody and further modified by amino acid substitutions
DTFGHSS

SEQ ID NO: 692 - protein, 7 aa, Artificial Sequence
  Amino acid sequence derived from Murine monoclonal antibody and further modified by amino acid substitutions
DTFGHKS

SEQ ID NO: 693 - protein, 7 aa, Artificial Sequence
  Amino acid sequence derived from Murine monoclonal antibody and further modified by amino acid substitutions
DTFGHRS

SEQ ID NO: 694 - protein, 7 aa, Artificial Sequence
  Amino acid sequence derived from Murine monoclonal antibody and further modified by amino acid substitutions
DTFGHHS

SEQ ID NO: 695 - protein, 7 aa, Artificial Sequence
  Amino acid sequence derived from Murine monoclonal antibody and further modified by amino acid substitutions
DTFGHPS

SEQ ID NO: 696 - protein, 7 aa, Artificial Sequence
  Amino acid sequence derived from Murine monoclonal antibody and further modified by amino acid substitutions
DTFGHTS

SEQ ID NO: 697 - protein, 7 aa, Artificial Sequence
  Amino acid sequence derived from Murine monoclonal antibody and further modified by amino acid substitutions
DTFGHDS

SEQ ID NO: 698 - protein, 7 aa, Artificial Sequence
  Amino acid sequence derived from Murine monoclonal antibody and further modified by amino acid substitutions
DTFGQAS

SEQ ID NO: 699 - protein, 7 aa, Artificial Sequence
  Amino acid sequence derived from Murine monoclonal antibody and further modified by amino acid substitutions
DTFGQSS

SEQ ID NO: 700 - protein, 7 aa, Artificial Sequence
  Amino acid sequence derived from Murine monoclonal antibody and further modified by amino acid substitutions
DTFGQKS

SEQ ID NO: 701 - protein, 7 aa, Artificial Sequence
  Amino acid sequence derived from Murine monoclonal antibody and further modified by amino acid substitutions
DTFGQRS

SEQ ID NO: 702 - protein, 7 aa, Artificial Sequence
  Amino acid sequence derived from Murine monoclonal antibody and further modified by amino acid substitutions
DTFGQHS

SEQ ID NO: 703 - protein, 7 aa, Artificial Sequence
  Amino acid sequence derived from Murine monoclonal antibody and further modified by amino acid substitutions
DTFGQPS

SEQ ID NO: 704 - protein, 7 aa, Artificial Sequence
  Amino acid sequence derived from Murine monoclonal antibody and further modified by amino acid substitutions
DTFGQTS

SEQ ID NO: 705 - protein, 7 aa, Artificial Sequence
  Amino acid sequence derived from Murine monoclonal antibody and further modified by amino acid substitutions
DTFGQDS

SEQ ID NO: 706 - protein, 7 aa, Artificial Sequence
  Amino acid sequence derived from Murine monoclonal antibody and further modified by amino acid substitutions
DTFRLAS

SEQ ID NO: 707 - protein, 7 aa, Artificial Sequence
  Amino acid sequence derived from Murine monoclonal antibody and further modified by amino acid substitutions
DTFRLSS

SEQ ID NO: 708 - protein, 7 aa, Artificial Sequence
  Amino acid sequence derived from Murine monoclonal antibody and further modified by amino acid substitutions
DTFRLKS

SEQ ID NO: 709 - protein, 7 aa, Artificial Sequence
  Amino acid sequence derived from Murine monoclonal antibody and further modified by amino acid substitutions
DTFRLRS

SEQ ID NO: 710 - protein, 7 aa, Artificial Sequence
  Amino acid sequence derived from Murine monoclonal antibody and further modified by amino acid substitutions
DTFRLHS

SEQ ID NO: 711 - protein, 7 aa, Artificial Sequence
  Amino acid sequence derived from Murine monoclonal antibody and further modified by amino acid substitutions
DTFRLPS

SEQ ID NO: 712 - protein, 7 aa, Artificial Sequence
  Amino acid sequence derived from Murine monoclonal antibody and further modified by amino acid substitutions
DTFRLTS

SEQ ID NO: 713 - protein, 7 aa, Artificial Sequence
  Amino acid sequence derived from Murine monoclonal antibody and further modified by amino acid substitutions
DTFRLDS

SEQ ID NO: 714 - protein, 7 aa, Artificial Sequence
  Amino acid sequence derived from Murine monoclonal antibody and further modified by amino acid substitutions
DTFRHAS

SEQ ID NO: 715 - protein, 7 aa, Artificial Sequence
  Amino acid sequence derived from Murine monoclonal antibody and further modified by amino acid substitutions
DTFRHSS

SEQ ID NO: 716 - protein, 7 aa, Artificial Sequence
  Amino acid sequence derived from Murine monoclonal antibody and further modified by amino acid substitutions
DTFRHKS

SEQ ID NO: 717 - protein, 7 aa, Artificial Sequence
  Amino acid sequence derived from Murine monoclonal antibody and further modified by amino acid substitutions
DTFRHRS

SEQ ID NO: 718 - protein, 7 aa, Artificial Sequence
  Amino acid sequence derived from Murine monoclonal antibody and further modified by amino acid substitutions
DTFRHHS

SEQ ID NO: 719 - protein, 7 aa, Artificial Sequence
  Amino acid sequence derived from Murine monoclonal antibody and further modified by amino acid substitutions
DTFRHPS

SEQ ID NO: 720 - protein, 7 aa, Artificial Sequence
  Amino acid sequence derived from Murine monoclonal antibody and further modified by amino acid substitutions
DTFRHTS

SEQ ID NO: 721 - protein, 7 aa, Artificial Sequence
  Amino acid sequence derived from Murine monoclonal antibody and further modified by amino acid substitutions
DTFRHDS

SEQ ID NO: 722 - protein, 7 aa, Artificial Sequence
  Amino acid sequence derived from Murine monoclonal antibody and further modified by amino acid substitutions
DTFRQAS

SEQ ID NO: 723 - protein, 7 aa, Artificial Sequence
  Amino acid sequence derived from Murine monoclonal antibody and further modified by amino acid substitutions
DTFRQSS

SEQ ID NO: 724 - protein, 7 aa, Artificial Sequence
  Amino acid sequence derived from Murine monoclonal antibody and further modified by amino acid substitutions
DTFRQKS

SEQ ID NO: 725 - protein, 7 aa, Artificial Sequence
  Amino acid sequence derived from Murine monoclonal antibody and further modified by amino acid substitutions
DTFRQRS

SEQ ID NO: 726 - protein, 7 aa, Artificial Sequence
  Amino acid sequence derived from Murine monoclonal antibody and further modified by amino acid substitutions
DTFRQHS

SEQ ID NO: 727 - protein, 7 aa, Artificial Sequence
  Amino acid sequence derived from Murine monoclonal antibody and further modified by amino acid substitutions
DTFRQPS

SEQ ID NO: 728 - protein, 7 aa, Artificial Sequence
  Amino acid sequence derived from Murine monoclonal antibody and further modified by amino acid substitutions
DTFRQTS

SEQ ID NO: 729 - protein, 7 aa, Artificial Sequence
  Amino acid sequence derived from Murine monoclonal antibody and further modified by amino acid substitutions
DTFRQDS

SEQ ID NO: 730 - protein, 7 aa, Artificial Sequence
  Amino acid sequence derived from Murine monoclonal antibody and further modified by amino acid substitutions
DTFYLKS

SEQ ID NO: 731 - protein, 7 aa, Artificial Sequence
  Amino acid sequence derived from Murine monoclonal antibody and further modified by amino acid substitutions
DTFYLRS

SEQ ID NO: 732 - protein, 7 aa, Artificial Sequence
  Amino acid sequence derived from Murine monoclonal antibody and further modified by amino acid substitutions
DTFYLHS

SEQ ID NO: 733 - protein, 7 aa, Artificial Sequence
  Amino acid sequence derived from Murine monoclonal antibody and further modified by amino acid substitutions
DTFYLPS

SEQ ID NO: 734 - protein, 7 aa, Artificial Sequence
  Amino acid sequence derived from Murine monoclonal antibody and further modified by amino acid substitutions
DTFYLTS

SEQ ID NO: 735 - protein, 7 aa, Artificial Sequence
  Amino acid sequence derived from Murine monoclonal antibody and further modified by amino acid substitutions
DTFYLDS

SEQ ID NO: 736 - protein, 7 aa, Artificial Sequence
  Amino acid sequence derived from Murine monoclonal antibody and further modified by amino acid substitutions
DTFYHAS

SEQ ID NO: 737 - protein, 7 aa, Artificial Sequence
  Amino acid sequence derived from Murine monoclonal antibody and further modified by amino acid substitutions
DTFYHSS

SEQ ID NO: 738 - protein, 7 aa, Artificial Sequence
  Amino acid sequence derived from Murine monoclonal antibody and further modified by amino acid substitutions
DTFYHKS

SEQ ID NO: 739 - protein, 7 aa, Artificial Sequence
  Amino acid sequence derived from Murine monoclonal antibody and further modified by amino acid substitutions
DTFYHRS

SEQ ID NO: 740 - protein, 7 aa, Artificial Sequence
  Amino acid sequence derived from Murine monoclonal antibody and further modified by amino acid substitutions
DTFYHHS

SEQ ID NO: 741 - protein, 7 aa, Artificial Sequence
  Amino acid sequence derived from Murine monoclonal antibody and further modified by amino acid substitutions
DTFYHPS

SEQ ID NO: 742 - protein, 7 aa, Artificial Sequence
  Amino acid sequence derived from Murine monoclonal antibody and further modified by amino acid substitutions
DTFYHTS

SEQ ID NO: 743 - protein, 7 aa, Artificial Sequence
  Amino acid sequence derived from Murine monoclonal antibody and further modified by amino acid substitutions
DTFYHDS

SEQ ID NO: 744 - protein, 7 aa, Artificial Sequence
  Amino acid sequence derived from Murine monoclonal antibody and further modified by amino acid substitutions
DTFYQAS

SEQ ID NO: 745 - protein, 7 aa, Artificial Sequence
  Amino acid sequence derived from Murine monoclonal antibody and further modified by amino acid substitutions
DTFYQSS

SEQ ID NO: 746 - protein, 7 aa, Artificial Sequence
  Amino acid sequence derived from Murine monoclonal antibody and further modified by amino acid substitutions
DTFYQKS

SEQ ID NO: 747 - protein, 7 aa, Artificial Sequence
  Amino acid sequence derived from Murine monoclonal antibody and further modified by amino acid substitutions
DTFYQRS

SEQ ID NO: 748 - protein, 7 aa, Artificial Sequence
  Amino acid sequence derived from Murine monoclonal antibody and further modified by amino acid substitutions
DTFYQHS

SEQ ID NO: 749 - protein, 7 aa, Artificial Sequence
  Amino acid sequence derived from Murine monoclonal antibody and further modified by amino acid substitutions
DTFYQPS

SEQ ID NO: 750 - protein, 7 aa, Artificial Sequence
  Amino acid sequence derived from Murine monoclonal antibody and further modified by amino acid substitutions
DTFYQTS

SEQ ID NO: 751 - protein, 7 aa, Artificial Sequence
  Amino acid sequence derived from Murine monoclonal antibody and further modified by amino acid substitutions
DTFYQDS

SEQ ID NO: 752 - protein, 7 aa, Artificial Sequence
  Amino acid sequence derived from Murine monoclonal antibody and further modified by amino acid substitutions
DTFFLAS

SEQ ID NO: 753 - protein, 7 aa, Artificial Sequence
  Amino acid sequence derived from Murine monoclonal antibody and further modified by amino acid substitutions
DTFFLSS

SEQ ID NO: 754 - protein, 7 aa, Artificial Sequence
  Amino acid sequence derived from Murine monoclonal antibody and further modified by amino acid substitutions
DTFFLKS

SEQ ID NO: 755 - protein, 7 aa, Artificial Sequence
  Amino acid sequence derived from Murine monoclonal antibody and further modified by amino acid substitutions
DTFFLRS

SEQ ID NO: 756 - protein, 7 aa, Artificial Sequence
  Amino acid sequence derived from Murine monoclonal antibody and further modified by amino acid substitutions
DTFFLHS

SEQ ID NO: 757 - protein, 7 aa, Artificial Sequence
  Amino acid sequence derived from Murine monoclonal antibody and further modified by amino acid substitutions
DTFFLPS

SEQ ID NO: 758 - protein, 7 aa, Artificial Sequence
  Amino acid sequence derived from Murine monoclonal antibody and further modified by amino acid substitutions
DTFFLTS

SEQ ID NO: 759 - protein, 7 aa, Artificial Sequence
  Amino acid sequence derived from Murine monoclonal antibody and further modified by amino acid substitutions
DTFFHAS

SEQ ID NO: 760 - protein, 7 aa, Artificial Sequence
  Amino acid sequence derived from Murine monoclonal antibody and further modified by amino acid substitutions
DTFFHSS

SEQ ID NO: 761 - protein, 7 aa, Artificial Sequence
  Amino acid sequence derived from Murine monoclonal antibody and further modified by amino acid substitutions
DTFFHKS

SEQ ID NO: 762 - protein, 7 aa, Artificial Sequence
  Amino acid sequence derived from Murine monoclonal antibody and further modified by amino acid substitutions
DTFFHRS

SEQ ID NO: 763 - protein, 7 aa, Artificial Sequence
  Amino acid sequence derived from Murine monoclonal antibody and further modified by amino acid substitutions
DTFFHHS

SEQ ID NO: 764 - protein, 7 aa, Artificial Sequence
  Amino acid sequence derived from Murine monoclonal antibody and further modified by amino acid substitutions
DTFFHPS

SEQ ID NO: 765 - protein, 7 aa, Artificial Sequence
  Amino acid sequence derived from Murine monoclonal antibody and further modified by amino acid substitutions
DTFFHTS

SEQ ID NO: 766 - protein, 7 aa, Artificial Sequence
  Amino acid sequence derived from Murine monoclonal antibody and further modified by amino acid substitutions
DTFFHDS

SEQ ID NO: 767 - protein, 7 aa, Artificial Sequence
  Amino acid sequence derived from Murine monoclonal antibody and further modified by amino acid substitutions
DTFFQAS

SEQ ID NO: 768 - protein, 7 aa, Artificial Sequence
  Amino acid sequence derived from Murine monoclonal antibody and further modified by amino acid substitutions
DTFFQSS

SEQ ID NO: 769 - protein, 7 aa, Artificial Sequence
  Amino acid sequence derived from Murine monoclonal antibody and further modified by amino acid substitutions
DTFFQKS

SEQ ID NO: 770 - protein, 7 aa, Artificial Sequence
  Amino acid sequence derived from Murine monoclonal antibody and further modified by amino acid substitutions
DTFFQRS

SEQ ID NO: 771 - protein, 7 aa, Artificial Sequence
  Amino acid sequence derived from Murine monoclonal antibody and further modified by amino acid substitutions
DTFFQHS

SEQ ID NO: 772 - protein, 7 aa, Artificial Sequence
  Amino acid sequence derived from Murine monoclonal antibody and further modified by amino acid substitutions
DTFFQPS

SEQ ID NO: 773 - protein, 7 aa, Artificial Sequence
  Amino acid sequence derived from Murine monoclonal antibody and further modified by amino acid substitutions
DTFFQTS

SEQ ID NO: 774 - protein, 7 aa, Artificial Sequence
  Amino acid sequence derived from Murine monoclonal antibody and further modified by amino acid substitutions
DTFFQDS

SEQ ID NO: 775 - protein, 7 aa, Artificial Sequence
  Amino acid sequence derived from Murine monoclonal antibody and further modified by amino acid substitutions
DTFLLAS

SEQ ID NO: 776 - protein, 7 aa, Artificial Sequence
  Amino acid sequence derived from Murine monoclonal antibody and further modified by amino acid substitutions
DTFLLSS

SEQ ID NO: 777 - protein, 7 aa, Artificial Sequence
  Amino acid sequence derived from Murine monoclonal antibody and further modified by amino acid substitutions
DTFLLKS

SEQ ID NO: 778 - protein, 7 aa, Artificial Sequence
  Amino acid sequence derived from Murine monoclonal antibody and further modified by amino acid substitutions
DTFLLRS

SEQ ID NO: 779 - protein, 7 aa, Artificial Sequence
  Amino acid sequence derived from Murine monoclonal antibody and further modified by amino acid substitutions
DTFLLHS

SEQ ID NO: 780 - protein, 7 aa, Artificial Sequence
  Amino acid sequence derived from Murine monoclonal antibody and further modified by amino acid substitutions
DTFLLPS

SEQ ID NO: 781 - protein, 7 aa, Artificial Sequence
  Amino acid sequence derived from Murine monoclonal antibody and further modified by amino acid substitutions
DTFLLTS

SEQ ID NO: 782 - protein, 7 aa, Artificial Sequence
  Amino acid sequence derived from Murine monoclonal antibody and further modified by amino acid substitutions
DTFLLDS

SEQ ID NO: 783 - protein, 7 aa, Artificial Sequence
  Amino acid sequence derived from Murine monoclonal antibody and further modified by amino acid substitutions
DTFLHAS

SEQ ID NO: 784 - protein, 7 aa, Artificial Sequence
  Amino acid sequence derived from Murine monoclonal antibody and further modified by amino acid substitutions
DTFLHSS

SEQ ID NO: 785 - protein, 7 aa, Artificial Sequence
  Amino acid sequence derived from Murine monoclonal antibody and further modified by amino acid substitutions
DTFLHKS

SEQ ID NO: 786 - protein, 7 aa, Artificial Sequence
  Amino acid sequence derived from Murine monoclonal antibody and further modified by amino acid substitutions
DTFLHRS

SEQ ID NO: 787 - protein, 7 aa, Artificial Sequence
  Amino acid sequence derived from Murine monoclonal antibody and further modified by amino acid substitutions
DTFLHHS

SEQ ID NO: 788 - protein, 7 aa, Artificial Sequence
  Amino acid sequence derived from Murine monoclonal antibody and further modified by amino acid substitutions
DTFLHPS

SEQ ID NO: 789 - protein, 7 aa, Artificial Sequence
  Amino acid sequence derived from Murine monoclonal antibody and further modified by amino acid substitutions
DTFLHTS

SEQ ID NO: 790 - protein, 7 aa, Artificial Sequence
  Amino acid sequence derived from Murine monoclonal antibody and further modified by amino acid substitutions
DTFLHDS

SEQ ID NO: 791 - protein, 7 aa, Artificial Sequence
  Amino acid sequence derived from Murine monoclonal antibody and further modified by amino acid substitutions
DTFLQAS

SEQ ID NO: 792 - protein, 7 aa, Artificial Sequence
  Amino acid sequence derived from Murine monoclonal antibody and further modified by amino acid substitutions
DTFLQSS

SEQ ID NO: 793 - protein, 7 aa, Artificial Sequence
  Amino acid sequence derived from Murine monoclonal antibody and further modified by amino acid substitutions
DTFLQKS

SEQ ID NO: 794 - protein, 7 aa, Artificial Sequence
  Amino acid sequence derived from Murine monoclonal antibody and further modified by amino acid substitutions
DTFLQRS

SEQ ID NO: 795 - protein, 7 aa, Artificial Sequence
  Amino acid sequence derived from Murine monoclonal antibody and further modified by amino acid substitutions
DTFLQHS

SEQ ID NO: 796 - protein, 7 aa, Artificial Sequence
  Amino acid sequence derived from Murine monoclonal antibody and further modified by amino acid substitutions
DTFLQPS

SEQ ID NO: 797 - protein, 7 aa, Artificial Sequence
  Amino acid sequence derived from Murine monoclonal antibody and further modified by amino acid substitutions
DTFLQTS

SEQ ID NO: 798 - protein, 7 aa, Artificial Sequence
  Amino acid sequence derived from Murine monoclonal antibody and further modified by amino acid substitutions
DTFLQDS

SEQ ID NO: 799 - protein, 7 aa, Artificial Sequence
  Amino acid sequence derived from Murine monoclonal antibody and further modified by amino acid substitutions
DTYKLAS

SEQ ID NO: 800 - protein, 7 aa, Artificial Sequence
  Amino acid sequence derived from Murine monoclonal antibody and further modified by amino acid substitutions
DTYKLSS

SEQ ID NO: 801 - protein, 7 aa, Artificial Sequence
  Amino acid sequence derived from Murine monoclonal antibody and further modified by amino acid substitutions
DTYKLKS

SEQ ID NO: 802 - protein, 7 aa, Artificial Sequence
  Amino acid sequence derived from Murine monoclonal antibody and further modified by amino acid substitutions
DTYKLRS

SEQ ID NO: 803 - protein, 7 aa, Artificial Sequence
  Amino acid sequence derived from Murine monoclonal antibody and further modified by amino acid substitutions
DTYKLHS

SEQ ID NO: 804 - protein, 7 aa, Artificial Sequence
  Amino acid sequence derived from Murine monoclonal antibody and further modified by amino acid substitutions
DTYKLPS

SEQ ID NO: 805 - protein, 7 aa, Artificial Sequence
  Amino acid sequence derived from Murine monoclonal antibody and further modified by amino acid substitutions
DTYKLTS

SEQ ID NO: 806 - protein, 7 aa, Artificial Sequence
  Amino acid sequence derived from Murine monoclonal antibody and further modified by amino acid substitutions
DTYKLDS

SEQ ID NO: 807 - protein, 7 aa, Artificial Sequence
  Amino acid sequence derived from Murine monoclonal antibody and further modified by amino acid substitutions
DTYKHAS

SEQ ID NO: 808 - protein, 7 aa, Artificial Sequence
  Amino acid sequence derived from Murine monoclonal antibody and further modified by amino acid substitutions
DTYKHSS

SEQ ID NO: 809 - protein, 7 aa, Artificial Sequence
  Amino acid sequence derived from Murine monoclonal antibody and further modified by amino acid substitutions
DTYKHKS

SEQ ID NO: 810 - protein, 7 aa, Artificial Sequence
  Amino acid sequence derived from Murine monoclonal antibody and further modified by amino acid substitutions
DTYKHRS

SEQ ID NO: 811 - protein, 7 aa, Artificial Sequence
  Amino acid sequence derived from Murine monoclonal antibody and further modified by amino acid substitutions
DTYKHHS

SEQ ID NO: 812 - protein, 7 aa, Artificial Sequence
  Amino acid sequence derived from Murine monoclonal antibody and further modified by amino acid substitutions
DTYKHPS

SEQ ID NO: 813 - protein, 7 aa, Artificial Sequence
  Amino acid sequence derived from Murine monoclonal antibody and further modified by amino acid substitutions
DTYKHTS

SEQ ID NO: 814 - protein, 7 aa, Artificial Sequence
  Amino acid sequence derived from Murine monoclonal antibody and further modified by amino acid substitutions
DTYKHDS

SEQ ID NO: 815 - protein, 7 aa, Artificial Sequence
  Amino acid sequence derived from Murine monoclonal antibody and further modified by amino acid substitutions
DTYKQAS

SEQ ID NO: 816 - protein, 7 aa, Artificial Sequence
  Amino acid sequence derived from Murine monoclonal antibody and further modified by amino acid substitutions
DTYKQSS

SEQ ID NO: 817 - protein, 7 aa, Artificial Sequence
  Amino acid sequence derived from Murine monoclonal antibody and further modified by amino acid substitutions
DTYKQKS

SEQ ID NO: 818 - protein, 7 aa, Artificial Sequence
  Amino acid sequence derived from Murine monoclonal antibody and further modified by amino acid substitutions
DTYKQRS

SEQ ID NO: 819 - protein, 7 aa, Artificial Sequence
  Amino acid sequence derived from Murine monoclonal antibody and further modified by amino acid substitutions
DTYKQHS

SEQ ID NO: 820 - protein, 7 aa, Artificial Sequence
  Amino acid sequence derived from Murine monoclonal antibody and further modified by amino acid substitutions
DTYKQPS

SEQ ID NO: 821 - protein, 7 aa, Artificial Sequence
  Amino acid sequence derived from Murine monoclonal antibody and further modified by amino acid substitutions
DTYKQTS

SEQ ID NO: 822 - protein, 7 aa, Artificial Sequence
  Amino acid sequence derived from Murine monoclonal antibody and further modified by amino acid substitutions
DTYKQDS

SEQ ID NO: 823 - protein, 7 aa, Artificial Sequence
  Amino acid sequence derived from Murine monoclonal antibody and further modified by amino acid substitutions
DTYGLAS

SEQ ID NO: 824 - protein, 7 aa, Artificial Sequence
  Amino acid sequence derived from Murine monoclonal antibody and further modified by amino acid substitutions
DTYGLSS

SEQ ID NO: 825 - protein, 7 aa, Artificial Sequence
  Amino acid sequence derived from Murine monoclonal antibody and further modified by amino acid substitutions
DTYGLKS

SEQ ID NO: 826 - protein, 7 aa, Artificial Sequence
  Amino acid sequence derived from Murine monoclonal antibody and further modified by amino acid substitutions
DTYGLRS

SEQ ID NO: 827 - protein, 7 aa, Artificial Sequence
  Amino acid sequence derived from Murine monoclonal antibody and further modified by amino acid substitutions
DTYGLHS

SEQ ID NO: 828 - protein, 7 aa, Artificial Sequence
  Amino acid sequence derived from Murine monoclonal antibody and further modified by amino acid substitutions
DTYGLPS

SEQ ID NO: 829 - protein, 7 aa, Artificial Sequence
  Amino acid sequence derived from Murine monoclonal antibody and further modified by amino acid substitutions
DTYGLTS

SEQ ID NO: 830 - protein, 7 aa, Artificial Sequence
  Amino acid sequence derived from Murine monoclonal antibody and further modified by amino acid substitutions
DTYGLDS

SEQ ID NO: 831 - protein, 7 aa, Artificial Sequence
  Amino acid sequence derived from Murine monoclonal antibody and further modified by amino acid substitutions
DTYGHAS

SEQ ID NO: 832 - protein, 7 aa, Artificial Sequence
  Amino acid sequence derived from Murine monoclonal antibody and further modified by amino acid substitutions
DTYGHSS

SEQ ID NO: 833 - protein, 7 aa, Artificial Sequence
  Amino acid sequence derived from Murine monoclonal antibody and further modified by amino acid substitutions
DTYGHKS

SEQ ID NO: 834 - protein, 7 aa, Artificial Sequence
  Amino acid sequence derived from Murine monoclonal antibody and further modified by amino acid substitutions
DTYGHRS

SEQ ID NO: 835 - protein, 7 aa, Artificial Sequence
  Amino acid sequence derived from Murine monoclonal antibody and further modified by amino acid substitutions
DTYGHHS

SEQ ID NO: 836 - protein, 7 aa, Artificial Sequence
  Amino acid sequence derived from Murine monoclonal antibody and further modified by amino acid substitutions
DTYGHPS

SEQ ID NO: 837 - protein, 7 aa, Artificial Sequence
  Amino acid sequence derived from Murine monoclonal antibody and further modified by amino acid substitutions
DTYGHTS

SEQ ID NO: 838 - protein, 7 aa, Artificial Sequence
  Amino acid sequence derived from Murine monoclonal antibody and further modified by amino acid substitutions
DTYGHDS

SEQ ID NO: 839 - protein, 7 aa, Artificial Sequence
  Amino acid sequence derived from Murine monoclonal antibody and further modified by amino acid substitutions
DTYGQAS

SEQ ID NO: 840 - protein, 7 aa, Artificial Sequence
  Amino acid sequence derived from Murine monoclonal antibody and further modified by amino acid substitutions
DTYGQSS

SEQ ID NO: 841 - protein, 7 aa, Artificial Sequence
  Amino acid sequence derived from Murine monoclonal antibody and further modified by amino acid substitutions
DTYGQKS

SEQ ID NO: 842 - protein, 7 aa, Artificial Sequence
  Amino acid sequence derived from Murine monoclonal antibody and further modified by amino acid substitutions
DTYGQRS

SEQ ID NO: 843 - protein, 7 aa, Artificial Sequence
  Amino acid sequence derived from Murine monoclonal antibody and further modified by amino acid substitutions
DTYGQHS

SEQ ID NO: 844 - protein, 7 aa, Artificial Sequence
  Amino acid sequence derived from Murine monoclonal antibody and further modified by amino acid substitutions
DTYGQPS

SEQ ID NO: 845 - protein, 7 aa, Artificial Sequence
  Amino acid sequence derived from Murine monoclonal antibody and further modified by amino acid substitutions
DTYGQTS

SEQ ID NO: 846 - protein, 7 aa, Artificial Sequence
  Amino acid sequence derived from Murine monoclonal antibody and further modified by amino acid substitutions
DTYGQDS

SEQ ID NO: 847 - protein, 7 aa, Artificial Sequence
  Amino acid sequence derived from Murine monoclonal antibody and further modified by amino acid substitutions
DTYRLAS

SEQ ID NO: 848 - protein, 7 aa, Artificial Sequence
  Amino acid sequence derived from Murine monoclonal antibody and further modified by amino acid substitutions
DTYRLSS

SEQ ID NO: 849 - protein, 7 aa, Artificial Sequence
  Amino acid sequence derived from Murine monoclonal antibody and further modified by amino acid substitutions
DTYRLKS

SEQ ID NO: 850 - protein, 7 aa, Artificial Sequence
  Amino acid sequence derived from Murine monoclonal antibody and further modified by amino acid substitutions
DTYRLRS

SEQ ID NO: 851 - protein, 7 aa, Artificial Sequence
  Amino acid sequence derived from Murine monoclonal antibody and further modified by amino acid substitutions
DTYRLHS

SEQ ID NO: 852 - protein, 7 aa, Artificial Sequence
  Amino acid sequence derived from Murine monoclonal antibody and further modified by amino acid substitutions
DTYRLPS

SEQ ID NO: 853 - protein, 7 aa, Artificial Sequence
  Amino acid sequence derived from Murine monoclonal antibody and further modified by amino acid substitutions
DTYRLTS

SEQ ID NO: 854 - protein, 7 aa, Artificial Sequence
  Amino acid sequence derived from Murine monoclonal antibody and further modified by amino acid substitutions
DTYRLDS

SEQ ID NO: 855 - protein, 7 aa, Artificial Sequence
  Amino acid sequence derived from Murine monoclonal antibody and further modified by amino acid substitutions
DTYRHAS

SEQ ID NO: 856 - protein, 7 aa, Artificial Sequence
  Amino acid sequence derived from Murine monoclonal antibody and further modified by amino acid substitutions
DTYRHSS

SEQ ID NO: 857 - protein, 7 aa, Artificial Sequence
  Amino acid sequence derived from Murine monoclonal antibody and further modified by amino acid substitutions
DTYRHKS

SEQ ID NO: 858 - protein, 7 aa, Artificial Sequence
  Amino acid sequence derived from Murine monoclonal antibody and further modified by amino acid substitutions
DTYRHRS

SEQ ID NO: 859 - protein, 7 aa, Artificial Sequence
  Amino acid sequence derived from Murine monoclonal antibody and further modified by amino acid substitutions
DTYRHHS

SEQ ID NO: 860 - protein, 7 aa, Artificial Sequence
  Amino acid sequence derived from Murine monoclonal antibody and further modified by amino acid substitutions
DTYRHPS

SEQ ID NO: 861 - protein, 7 aa, Artificial Sequence
  Amino acid sequence derived from Murine monoclonal antibody and further modified by amino acid substitutions
DTYRHTS

SEQ ID NO: 862 - protein, 7 aa, Artificial Sequence
  Amino acid sequence derived from Murine monoclonal antibody and further modified by amino acid substitutions
DTYRHDS

SEQ ID NO: 863 - protein, 7 aa, Artificial Sequence
  Amino acid sequence derived from Murine monoclonal antibody and further modified by amino acid substitutions
DTYRQAS

SEQ ID NO: 864 - protein, 7 aa, Artificial Sequence
  Amino acid sequence derived from Murine monoclonal antibody and further modified by amino acid substitutions
DTYRQSS

SEQ ID NO: 865 - protein, 7 aa, Artificial Sequence
  Amino acid sequence derived from Murine monoclonal antibody and further modified by amino acid substitutions
DTYRQKS

SEQ ID NO: 866 - protein, 7 aa, Artificial Sequence
  Amino acid sequence derived from Murine monoclonal antibody and further modified by amino acid substitutions
DTYRQRS

SEQ ID NO: 867 - protein, 7 aa, Artificial Sequence
  Amino acid sequence derived from Murine monoclonal antibody and further modified by amino acid substitutions
DTYRQHS

SEQ ID NO: 868 - protein, 7 aa, Artificial Sequence
  Amino acid sequence derived from Murine monoclonal antibody and further modified by amino acid substitutions
DTYRQPS

SEQ ID NO: 869 - protein, 7 aa, Artificial Sequence
  Amino acid sequence derived from Murine monoclonal antibody and further modified by amino acid substitutions
DTYRQTS

SEQ ID NO: 870 - protein, 7 aa, Artificial Sequence
  Amino acid sequence derived from Murine monoclonal antibody and further modified by amino acid substitutions
DTYRQDS

SEQ ID NO: 871 - protein, 7 aa, Artificial Sequence
  Amino acid sequence derived from Murine monoclonal antibody and further modified by amino acid substitutions
DTYYLAS

SEQ ID NO: 872 - protein, 7 aa, Artificial Sequence
  Amino acid sequence derived from Murine monoclonal antibody and further modified by amino acid substitutions
DTYYLSS

SEQ ID NO: 873 - protein, 7 aa, Artificial Sequence
  Amino acid sequence derived from Murine monoclonal antibody and further modified by amino acid substitutions
DTYYLKS

SEQ ID NO: 874 - protein, 7 aa, Artificial Sequence
  Amino acid sequence derived from Murine monoclonal antibody and further modified by amino acid substitutions
DTYYLRS

SEQ ID NO: 875 - protein, 7 aa, Artificial Sequence
  Amino acid sequence derived from Murine monoclonal antibody and further modified by amino acid substitutions
DTYYLHS

SEQ ID NO: 876 - protein, 7 aa, Artificial Sequence
  Amino acid sequence derived from Murine monoclonal antibody and further modified by amino acid substitutions
DTYYLPS

SEQ ID NO: 877 - protein, 7 aa, Artificial Sequence
  Amino acid sequence derived from Murine monoclonal antibody and further modified by amino acid substitutions
DTYYLTS

SEQ ID NO: 878 - protein, 7 aa, Artificial Sequence
  Amino acid sequence derived from Murine monoclonal antibody and further modified by amino acid substitutions
DTYYLDS

SEQ ID NO: 879 - protein, 7 aa, Artificial Sequence
  Amino acid sequence derived from Murine monoclonal antibody and further modified by amino acid substitutions
DTYYHAS

SEQ ID NO: 880 - protein, 7 aa, Artificial Sequence
  Amino acid sequence derived from Murine monoclonal antibody and further modified by amino acid substitutions
DTYYHSS

SEQ ID NO: 881 - protein, 7 aa, Artificial Sequence
  Amino acid sequence derived from Murine monoclonal antibody and further modified by amino acid substitutions
DTYYHKS

SEQ ID NO: 882 - protein, 7 aa, Artificial Sequence
  Amino acid sequence derived from Murine monoclonal antibody and further modified by amino acid substitutions
DTYYHRS

SEQ ID NO: 883 - protein, 7 aa, Artificial Sequence
  Amino acid sequence derived from Murine monoclonal antibody and further modified by amino acid substitutions
DTYYHHS

SEQ ID NO: 884 - protein, 7 aa, Artificial Sequence
  Amino acid sequence derived from Murine monoclonal antibody and further modified by amino acid substitutions
DTYYHPS

SEQ ID NO: 885 - protein, 7 aa, Artificial Sequence
  Amino acid sequence derived from Murine monoclonal antibody and further modified by amino acid substitutions
DTYYHTS

SEQ ID NO: 886 - protein, 7 aa, Artificial Sequence
  Amino acid sequence derived from Murine monoclonal antibody and further modified by amino acid substitutions
DTYYHDS

SEQ ID NO: 887 - protein, 7 aa, Artificial Sequence
  Amino acid sequence derived from Murine monoclonal antibody and further modified by amino acid substitutions
DTYYQAS

SEQ ID NO: 888 - protein, 7 aa, Artificial Sequence
  Amino acid sequence derived from Murine monoclonal antibody and further modified by amino acid substitutions
DTYYQSS

SEQ ID NO: 889 - protein, 7 aa, Artificial Sequence
  Amino acid sequence derived from Murine monoclonal antibody and further modified by amino acid substitutions
DTYYQKS

SEQ ID NO: 890 - protein, 7 aa, Artificial Sequence
  Amino acid sequence derived from Murine monoclonal antibody and further modified by amino acid substitutions
DTYYQRS

SEQ ID NO: 891 - protein, 7 aa, Artificial Sequence
  Amino acid sequence derived from Murine monoclonal antibody and further modified by amino acid substitutions
DTYYQHS

SEQ ID NO: 892 - protein, 7 aa, Artificial Sequence
  Amino acid sequence derived from Murine monoclonal antibody and further modified by amino acid substitutions
DTYYQPS

SEQ ID NO: 893 - protein, 7 aa, Artificial Sequence
  Amino acid sequence derived from Murine monoclonal antibody and further modified by amino acid substitutions
DTYYQTS

SEQ ID NO: 894 - protein, 7 aa, Artificial Sequence
  Amino acid sequence derived from Murine monoclonal antibody and further modified by amino acid substitutions
DTYYQDS

SEQ ID NO: 895 - protein, 7 aa, Artificial Sequence
  Amino acid sequence derived from Murine monoclonal antibody and further modified by amino acid substitutions
DTYFLAS

SEQ ID NO: 896 - protein, 7 aa, Artificial Sequence
  Amino acid sequence derived from Murine monoclonal antibody and further modified by amino acid substitutions
DTYFLSS

SEQ ID NO: 897 - protein, 7 aa, Artificial Sequence
  Amino acid sequence derived from Murine monoclonal antibody and further modified by amino acid substitutions
DTYFLKS

SEQ ID NO: 898 - protein, 7 aa, Artificial Sequence
  Amino acid sequence derived from Murine monoclonal antibody and further modified by amino acid substitutions
DTYFLRS

SEQ ID NO: 899 - protein, 7 aa, Artificial Sequence
  Amino acid sequence derived from Murine monoclonal antibody and further modified by amino acid substitutions
DTYFLHS

SEQ ID NO: 900 - protein, 7 aa, Artificial Sequence
  Amino acid sequence derived from Murine monoclonal antibody and further modified by amino acid substitutions
DTYFLPS

SEQ ID NO: 901 - protein, 7 aa, Artificial Sequence
  Amino acid sequence derived from Murine monoclonal antibody and further modified by amino acid substitutions
DTYFLTS

SEQ ID NO: 902 - protein, 7 aa, Artificial Sequence
  Amino acid sequence derived from Murine monoclonal antibody and further modified by amino acid substitutions
DTYFLDS

SEQ ID NO: 903 - protein, 7 aa, Artificial Sequence
  Amino acid sequence derived from Murine monoclonal antibody and further modified by amino acid substitutions
DTYFHAS

SEQ ID NO: 904 - protein, 7 aa, Artificial Sequence
  Amino acid sequence derived from Murine monoclonal antibody and further modified by amino acid substitutions
DTYFHSS

SEQ ID NO: 905 - protein, 7 aa, Artificial Sequence
  Amino acid sequence derived from Murine monoclonal antibody and further modified by amino acid substitutions
DTYFHKS

SEQ ID NO: 906 - protein, 7 aa, Artificial Sequence
  Amino acid sequence derived from Murine monoclonal antibody and further modified by amino acid substitutions
DTYFHRS

SEQ ID NO: 907 - protein, 7 aa, Artificial Sequence
  Amino acid sequence derived from Murine monoclonal antibody and further modified by amino acid substitutions
DTYFHHS

SEQ ID NO: 908 - protein, 7 aa, Artificial Sequence
  Amino acid sequence derived from Murine monoclonal antibody and further modified by amino acid substitutions
DTYFHPS

SEQ ID NO: 909 - protein, 7 aa, Artificial Sequence
  Amino acid sequence derived from Murine monoclonal antibody and further modified by amino acid substitutions
DTYFHTS

SEQ ID NO: 910 - protein, 7 aa, Artificial Sequence
  Amino acid sequence derived from Murine monoclonal antibody and further modified by amino acid substitutions
DTYFHDS

SEQ ID NO: 911 - protein, 7 aa, Artificial Sequence
  Amino acid sequence derived from Murine monoclonal antibody and further modified by amino acid substitutions
DTYFQAS

SEQ ID NO: 912 - protein, 7 aa, Artificial Sequence
  Amino acid sequence derived from Murine monoclonal antibody and further modified by amino acid substitutions
DTYFQSS

SEQ ID NO: 913 - protein, 7 aa, Artificial Sequence
  Amino acid sequence derived from Murine monoclonal antibody and further modified by amino acid substitutions
DTYFQKS

SEQ ID NO: 914 - protein, 7 aa, Artificial Sequence
  Amino acid sequence derived from Murine monoclonal antibody and further modified by amino acid substitutions
DTYFQRS

SEQ ID NO: 915 - protein, 7 aa, Artificial Sequence
  Amino acid sequence derived from Murine monoclonal antibody and further modified by amino acid substitutions
DTYFQHS

SEQ ID NO: 916 - protein, 7 aa, Artificial Sequence
  Amino acid sequence derived from Murine monoclonal antibody and further modified by amino acid substitutions
DTYFQPS

SEQ ID NO: 917 - protein, 7 aa, Artificial Sequence
  Amino acid sequence derived from Murine monoclonal antibody and further modified by amino acid substitutions
DTYFQTS

SEQ ID NO: 918 - protein, 7 aa, Artificial Sequence
  Amino acid sequence derived from Murine monoclonal antibody and further modified by amino acid substitutions
DTYFQDS

SEQ ID NO: 919 - protein, 7 aa, Artificial Sequence
  Amino acid sequence derived from Murine monoclonal antibody and further modified by amino acid substitutions
DTYLLAS

SEQ ID NO: 920 - protein, 7 aa, Artificial Sequence
  Amino acid sequence derived from Murine monoclonal antibody and further modified by amino acid substitutions
DTYLLSS

SEQ ID NO: 921 - protein, 7 aa, Artificial Sequence
  Amino acid sequence derived from Murine monoclonal antibody and further modified by amino acid substitutions
DTYLLKS

SEQ ID NO: 922 - protein, 7 aa, Artificial Sequence
  Amino acid sequence derived from Murine monoclonal antibody and further modified by amino acid substitutions
DTYLLRS

SEQ ID NO: 923 - protein, 7 aa, Artificial Sequence
  Amino acid sequence derived from Murine monoclonal antibody and further modified by amino acid substitutions
DTYLLHS

SEQ ID NO: 924 - protein, 7 aa, Artificial Sequence
  Amino acid sequence derived from Murine monoclonal antibody and further modified by amino acid substitutions
DTYLLPS

SEQ ID NO: 925 - protein, 7 aa, Artificial Sequence
  Amino acid sequence derived from Murine monoclonal antibody and further modified by amino acid substitutions
DTYLLTS

SEQ ID NO: 926 - protein, 7 aa, Artificial Sequence
  Amino acid sequence derived from Murine monoclonal antibody and further modified by amino acid substitutions
DTYLLDS

SEQ ID NO: 927 - protein, 7 aa, Artificial Sequence
  Amino acid sequence derived from Murine monoclonal antibody and further modified by amino acid substitutions
DTYLHAS

SEQ ID NO: 928 - protein, 7 aa, Artificial Sequence
  Amino acid sequence derived from Murine monoclonal antibody and further modified by amino acid substitutions
DTYLHSS

SEQ ID NO: 929 - protein, 7 aa, Artificial Sequence
  Amino acid sequence derived from Murine monoclonal antibody and further modified by amino acid substitutions
DTYLHKS

SEQ ID NO: 930 - protein, 7 aa, Artificial Sequence
  Amino acid sequence derived from Murine monoclonal antibody and further modified by amino acid substitutions
DTYLHRS

SEQ ID NO: 931 - protein, 7 aa, Artificial Sequence
  Amino acid sequence derived from Murine monoclonal antibody and further modified by amino acid substitutions
DTYLHHS

SEQ ID NO: 932 - protein, 7 aa, Artificial Sequence
  Amino acid sequence derived from Murine monoclonal antibody and further modified by amino acid substitutions
DTYLHPS

SEQ ID NO: 933 - protein, 7 aa, Artificial Sequence
  Amino acid sequence derived from Murine monoclonal antibody and further modified by amino acid substitutions
DTYLHTS

SEQ ID NO: 934 - protein, 7 aa, Artificial Sequence
  Amino acid sequence derived from Murine monoclonal antibody and further modified by amino acid substitutions
DTYLHDS

SEQ ID NO: 935 - protein, 7 aa, Artificial Sequence
  Amino acid sequence derived from Murine monoclonal antibody and further modified by amino acid substitutions
DTYLQAS

SEQ ID NO: 936 - protein, 7 aa, Artificial Sequence
  Amino acid sequence derived from Murine monoclonal antibody and further modified by amino acid substitutions
DTYLQSS

SEQ ID NO: 937 - protein, 7 aa, Artificial Sequence
  Amino acid sequence derived from Murine monoclonal antibody and further modified by amino acid substitutions
DTYLQKS

SEQ ID NO: 938 - protein, 7 aa, Artificial Sequence
  Amino acid sequence derived from Murine monoclonal antibody and further modified by amino acid substitutions
DTYLQRS

SEQ ID NO: 939 - protein, 7 aa, Artificial Sequence
  Amino acid sequence derived from Murine monoclonal antibody and further modified by amino acid substitutions
DTYLQHS

SEQ ID NO: 940 - protein, 7 aa, Artificial Sequence
  Amino acid sequence derived from Murine monoclonal antibody and further modified by amino acid substitutions
DTYLQPS

SEQ ID NO: 941 - protein, 7 aa, Artificial Sequence
  Amino acid sequence derived from Murine monoclonal antibody and further modified by amino acid substitutions
DTYLQTS

SEQ ID NO: 942 - protein, 7 aa, Artificial Sequence
  Amino acid sequence derived from Murine monoclonal antibody and further modified by amino acid substitutions
DTYLQDS

SEQ ID NO: 943 - protein, 7 aa, Artificial Sequence
  Amino acid sequence derived from Murine monoclonal antibody and further modified by amino acid substitutions
DTRKLKS

SEQ ID NO: 944 - protein, 7 aa, Artificial Sequence
  Amino acid sequence derived from Murine monoclonal antibody and further modified by amino acid substitutions
DTRKLRS

SEQ ID NO: 945 - protein, 7 aa, Artificial Sequence
  Amino acid sequence derived from Murine monoclonal antibody and further modified by amino acid substitutions
DTRKLHS

SEQ ID NO: 946 - protein, 7 aa, Artificial Sequence
  Amino acid sequence derived from Murine monoclonal antibody and further modified by amino acid substitutions
DTRKLTS

SEQ ID NO: 947 - protein, 7 aa, Artificial Sequence
  Amino acid sequence derived from Murine monoclonal antibody and further modified by amino acid substitutions
DTRKLDS

SEQ ID NO: 948 - protein, 7 aa, Artificial Sequence
  Amino acid sequence derived from Murine monoclonal antibody and further modified by amino acid substitutions
DTRKHAS

SEQ ID NO: 949 - protein, 7 aa, Artificial Sequence
  Amino acid sequence derived from Murine monoclonal antibody and further modified by amino acid substitutions
DTRKHSS

SEQ ID NO: 950 - protein, 7 aa, Artificial Sequence
  Amino acid sequence derived from Murine monoclonal antibody and further modified by amino acid substitutions
DTRKHKS

SEQ ID NO: 951 - protein, 7 aa, Artificial Sequence
  Amino acid sequence derived from Murine monoclonal antibody and further modified by amino acid substitutions
DTRKHRS

SEQ ID NO: 952 - protein, 7 aa, Artificial Sequence
  Amino acid sequence derived from Murine monoclonal antibody and further modified by amino acid substitutions
DTRKHHS

SEQ ID NO: 953 - protein, 7 aa, Artificial Sequence
  Amino acid sequence derived from Murine monoclonal antibody and further modified by amino acid substitutions
DTRKHPS

SEQ ID NO: 954 - protein, 7 aa, Artificial Sequence
  Amino acid sequence derived from Murine monoclonal antibody and further modified by amino acid substitutions
DTRKHTS

SEQ ID NO: 955 - protein, 7 aa, Artificial Sequence
  Amino acid sequence derived from Murine monoclonal antibody and further modified by amino acid substitutions
DTRKHDS

SEQ ID NO: 956 - protein, 7 aa, Artificial Sequence
  Amino acid sequence derived from Murine monoclonal antibody and further modified by amino acid substitutions
DTRKQKS

SEQ ID NO: 957 - protein, 7 aa, Artificial Sequence
  Amino acid sequence derived from Murine monoclonal antibody and further modified by amino acid substitutions
DTRKQRS

SEQ ID NO: 958 - protein, 7 aa, Artificial Sequence
  Amino acid sequence derived from Murine monoclonal antibody and further modified by amino acid substitutions
DTRKQHS

SEQ ID NO: 959 - protein, 7 aa, Artificial Sequence
  Amino acid sequence derived from Murine monoclonal antibody and further modified by amino acid substitutions
DTRKQPS

SEQ ID NO: 960 - protein, 7 aa, Artificial Sequence
  Amino acid sequence derived from Murine monoclonal antibody and further modified by amino acid substitutions
DTRKQTS

SEQ ID NO: 961 - protein, 7 aa, Artificial Sequence
  Amino acid sequence derived from Murine monoclonal antibody and further modified by amino acid substitutions
DTRKQDS

SEQ ID NO: 962 - protein, 7 aa, Artificial Sequence
  Amino acid sequence derived from Murine monoclonal antibody and further modified by amino acid substitutions
DTRGLSS

SEQ ID NO: 963 - protein, 7 aa, Artificial Sequence
  Amino acid sequence derived from Murine monoclonal antibody and further modified by amino acid substitutions
DTRGLKS

SEQ ID NO: 964 - protein, 7 aa, Artificial Sequence
  Amino acid sequence derived from Murine monoclonal antibody and further modified by amino acid substitutions
DTRGLRS

SEQ ID NO: 965 - protein, 7 aa, Artificial Sequence
  Amino acid sequence derived from Murine monoclonal antibody and further modified by amino acid substitutions
DTRGLHS

SEQ ID NO: 966 - protein, 7 aa, Artificial Sequence
  Amino acid sequence derived from Murine monoclonal antibody and further modified by amino acid substitutions
DTRGLTS

SEQ ID NO: 967 - protein, 7 aa, Artificial Sequence
  Amino acid sequence derived from Murine monoclonal antibody and further modified by amino acid substitutions
DTRGLDS

SEQ ID NO: 968 - protein, 7 aa, Artificial Sequence
  Amino acid sequence derived from Murine monoclonal antibody and further modified by amino acid substitutions
DTRGHAS

SEQ ID NO: 969 - protein, 7 aa, Artificial Sequence
  Amino acid sequence derived from Murine monoclonal antibody and further modified by amino acid substitutions
DTRGHSS

SEQ ID NO: 970 - protein, 7 aa, Artificial Sequence
  Amino acid sequence derived from Murine monoclonal antibody and further modified by amino acid substitutions
DTRGHKS

SEQ ID NO: 971 - protein, 7 aa, Artificial Sequence
  Amino acid sequence derived from Murine monoclonal antibody and further modified by amino acid substitutions
DTRGHRS

SEQ ID NO: 972 - protein, 7 aa, Artificial Sequence
  Amino acid sequence derived from Murine monoclonal antibody and further modified by amino acid substitutions
DTRGHHS

SEQ ID NO: 973 - protein, 7 aa, Artificial Sequence
  Amino acid sequence derived from Murine monoclonal antibody and further modified by amino acid substitutions
DTRGHPS

SEQ ID NO: 974 - protein, 7 aa, Artificial Sequence
  Amino acid sequence derived from Murine monoclonal antibody and further modified by amino acid substitutions
DTRGHTS

SEQ ID NO: 975 - protein, 7 aa, Artificial Sequence
  Amino acid sequence derived from Murine monoclonal antibody and further modified by amino acid substitutions
DTRGHDS

SEQ ID NO: 976 - protein, 7 aa, Artificial Sequence
  Amino acid sequence derived from Murine monoclonal antibody and further modified by amino acid substitutions
DTRGQAS

SEQ ID NO: 977 - protein, 7 aa, Artificial Sequence
  Amino acid sequence derived from Murine monoclonal antibody and further modified by amino acid substitutions
DTRGQSS

SEQ ID NO: 978 - protein, 7 aa, Artificial Sequence
  Amino acid sequence derived from Murine monoclonal antibody and further modified by amino acid substitutions
DTRGQKS

SEQ ID NO: 979 - protein, 7 aa, Artificial Sequence
  Amino acid sequence derived from Murine monoclonal antibody and further modified by amino acid substitutions
DTRGQRS

SEQ ID NO: 980 - protein, 7 aa, Artificial Sequence
  Amino acid sequence derived from Murine monoclonal antibody and further modified by amino acid substitutions
DTRGQHS

SEQ ID NO: 981 - protein, 7 aa, Artificial Sequence
  Amino acid sequence derived from Murine monoclonal antibody and further modified by amino acid substitutions
DTRGQPS

SEQ ID NO: 982 - protein, 7 aa, Artificial Sequence
  Amino acid sequence derived from Murine monoclonal antibody and further modified by amino acid substitutions
DTRGQTS

SEQ ID NO: 983 - protein, 7 aa, Artificial Sequence
  Amino acid sequence derived from Murine monoclonal antibody and further modified by amino acid substitutions
DTRGQDS

SEQ ID NO: 984 - protein, 7 aa, Artificial Sequence
  Amino acid sequence derived from Murine monoclonal antibody and further modified by amino acid substitutions
DTRRLAS

SEQ ID NO: 985 - protein, 7 aa, Artificial Sequence
  Amino acid sequence derived from Murine monoclonal antibody and further modified by amino acid substitutions
DTRRLSS

SEQ ID NO: 986 - protein, 7 aa, Artificial Sequence
  Amino acid sequence derived from Murine monoclonal antibody and further modified by amino acid substitutions
DTRRLKS

SEQ ID NO: 987 - protein, 7 aa, Artificial Sequence
  Amino acid sequence derived from Murine monoclonal antibody and further modified by amino acid substitutions
DTRRLRS

SEQ ID NO: 988 - protein, 7 aa, Artificial Sequence
  Amino acid sequence derived from Murine monoclonal antibody and further modified by amino acid substitutions
DTRRLHS

SEQ ID NO: 989 - protein, 7 aa, Artificial Sequence
  Amino acid sequence derived from Murine monoclonal antibody and further modified by amino acid substitutions
DTRRLPS

SEQ ID NO: 990 - protein, 7 aa, Artificial Sequence
  Amino acid sequence derived from Murine monoclonal antibody and further modified by amino acid substitutions
DTRRLTS

SEQ ID NO: 991 - protein, 7 aa, Artificial Sequence
  Amino acid sequence derived from Murine monoclonal antibody and further modified by amino acid substitutions
DTRRLDS

SEQ ID NO: 992 - protein, 7 aa, Artificial Sequence
  Amino acid sequence derived from Murine monoclonal antibody and further modified by amino acid substitutions
DTRRHAS

SEQ ID NO: 993 - protein, 7 aa, Artificial Sequence
  Amino acid sequence derived from Murine monoclonal antibody and further modified by amino acid substitutions
DTRRHSS

SEQ ID NO: 994 - protein, 7 aa, Artificial Sequence
  Amino acid sequence derived from Murine monoclonal antibody and further modified by amino acid substitutions
DTRRHKS

SEQ ID NO: 995 - protein, 7 aa, Artificial Sequence
  Amino acid sequence derived from Murine monoclonal antibody and further modified by amino acid substitutions
DTRRHRS

SEQ ID NO: 996 - protein, 7 aa, Artificial Sequence
  Amino acid sequence derived from Murine monoclonal antibody and further modified by amino acid substitutions
DTRRHHS

SEQ ID NO: 997 - protein, 7 aa, Artificial Sequence
  Amino acid sequence derived from Murine monoclonal antibody and further modified by amino acid substitutions
DTRRHPS

SEQ ID NO: 998 - protein, 7 aa, Artificial Sequence
  Amino acid sequence derived from Murine monoclonal antibody and further modified by amino acid substitutions
DTRRHTS

SEQ ID NO: 999 - protein, 7 aa, Artificial Sequence
  Amino acid sequence derived from Murine monoclonal antibody and further modified by amino acid substitutions
DTRRHDS

SEQ ID NO: 1000 - protein, 7 aa, Artificial Sequence
  Amino acid sequence derived from Murine monoclonal antibody and further modified by amino acid substitutions
DTRRQAS

SEQ ID NO: 1001 - protein, 7 aa, Artificial Sequence
  Amino acid sequence derived from Murine monoclonal antibody and further modified by amino acid substitutions
DTRRQSS

SEQ ID NO: 1002 - protein, 7 aa, Artificial Sequence
  Amino acid sequence derived from Murine monoclonal antibody and further modified by amino acid substitutions
DTRRQKS

SEQ ID NO: 1003 - protein, 7 aa, Artificial Sequence
  Amino acid sequence derived from Murine monoclonal antibody and further modified by amino acid substitutions
DTRRQRS

SEQ ID NO: 1004 - protein, 7 aa, Artificial Sequence
  Amino acid sequence derived from Murine monoclonal antibody and further modified by amino acid substitutions
DTRRQHS

SEQ ID NO: 1005 - protein, 7 aa, Artificial Sequence
  Amino acid sequence derived from Murine monoclonal antibody and further modified by amino acid substitutions
DTRRQPS

SEQ ID NO: 1006 - protein, 7 aa, Artificial Sequence
  Amino acid sequence derived from Murine monoclonal antibody and further modified by amino acid substitutions
DTRRQTS

SEQ ID NO: 1007 - protein, 7 aa, Artificial Sequence
  Amino acid sequence derived from Murine monoclonal antibody and further modified by amino acid substitutions
DTRRQDS

SEQ ID NO: 1008 - protein, 7 aa, Artificial Sequence
  Amino acid sequence derived from Murine monoclonal antibody and further modified by amino acid substitutions
DTRYLKS

SEQ ID NO: 1009 - protein, 7 aa, Artificial Sequence
  Amino acid sequence derived from Murine monoclonal antibody and further modified by amino acid substitutions
DTRYLRS

SEQ ID NO: 1010 - protein, 7 aa, Artificial Sequence
  Amino acid sequence derived from Murine monoclonal antibody and further modified by amino acid substitutions
DTRYLHS

SEQ ID NO: 1011 - protein, 7 aa, Artificial Sequence
  Amino acid sequence derived from Murine monoclonal antibody and further modified by amino acid substitutions
DTRYLPS

SEQ ID NO: 1012 - protein, 7 aa, Artificial Sequence
  Amino acid sequence derived from Murine monoclonal antibody and further modified by amino acid substitutions
DTRYLTS

SEQ ID NO: 1013 - protein, 7 aa, Artificial Sequence
  Amino acid sequence derived from Murine monoclonal antibody and further modified by amino acid substitutions
DTRYLDS

SEQ ID NO: 1014 - protein, 7 aa, Artificial Sequence
  Amino acid sequence derived from Murine monoclonal antibody and further modified by amino acid substitutions
DTRYHAS

SEQ ID NO: 1015 - protein, 7 aa, Artificial Sequence
  Amino acid sequence derived from Murine monoclonal antibody and further modified by amino acid substitutions
DTRYHSS

SEQ ID NO: 1016 - protein, 7 aa, Artificial Sequence
  Amino acid sequence derived from Murine monoclonal antibody and further modified by amino acid substitutions
DTRYHKS

SEQ ID NO: 1017 - protein, 7 aa, Artificial Sequence
  Amino acid sequence derived from Murine monoclonal antibody and further modified by amino acid substitutions
DTRYHRS

SEQ ID NO: 1018 - protein, 7 aa, Artificial Sequence
  Amino acid sequence derived from Murine monoclonal antibody and further modified by amino acid substitutions
DTRYHHS

SEQ ID NO: 1019 - protein, 7 aa, Artificial Sequence
  Amino acid sequence derived from Murine monoclonal antibody and further modified by amino acid substitutions
DTRYHPS

SEQ ID NO: 1020 - protein, 7 aa, Artificial Sequence
  Amino acid sequence derived from Murine monoclonal antibody and further modified by amino acid substitutions
DTRYHTS

SEQ ID NO: 1021 - protein, 7 aa, Artificial Sequence
  Amino acid sequence derived from Murine monoclonal antibody and further modified by amino acid substitutions
DTRYHDS

SEQ ID NO: 1022 - protein, 7 aa, Artificial Sequence
  Amino acid sequence derived from Murine monoclonal antibody and further modified by amino acid substitutions
DTRYQKS

SEQ ID NO: 1023 - protein, 7 aa, Artificial Sequence
  Amino acid sequence derived from Murine monoclonal antibody and further modified by amino acid substitutions
DTRYQRS

SEQ ID NO: 1024 - protein, 7 aa, Artificial Sequence
  Amino acid sequence derived from Murine monoclonal antibody and further modified by amino acid substitutions
DTRYQHS

SEQ ID NO: 1025 - protein, 7 aa, Artificial Sequence
  Amino acid sequence derived from Murine monoclonal antibody and further modified by amino acid substitutions
DTRYQPS

SEQ ID NO: 1026 - protein, 7 aa, Artificial Sequence
  Amino acid sequence derived from Murine monoclonal antibody and further modified by amino acid substitutions
DTRYQTS

SEQ ID NO: 1027 - protein, 7 aa, Artificial Sequence
  Amino acid sequence derived from Murine monoclonal antibody and further modified by amino acid substitutions
DTRYQDS

SEQ ID NO: 1028 - protein, 7 aa, Artificial Sequence
  Amino acid sequence derived from Murine monoclonal antibody and further modified by amino acid substitutions
DTRFLAS

SEQ ID NO: 1029 - protein, 7 aa, Artificial Sequence
  Amino acid sequence derived from Murine monoclonal antibody and further modified by amino acid substitutions
DTRFLSS

SEQ ID NO: 1030 - protein, 7 aa, Artificial Sequence
  Amino acid sequence derived from Murine monoclonal antibody and further modified by amino acid substitutions
DTRFLKS

SEQ ID NO: 1031 - protein, 7 aa, Artificial Sequence
  Amino acid sequence derived from Murine monoclonal antibody and further modified by amino acid substitutions
DTRFLRS

SEQ ID NO: 1032 - protein, 7 aa, Artificial Sequence
  Amino acid sequence derived from Murine monoclonal antibody and further modified by amino acid substitutions
DTRFLHS

SEQ ID NO: 1033 - protein, 7 aa, Artificial Sequence
  Amino acid sequence derived from Murine monoclonal antibody and further modified by amino acid substitutions
DTRFLPS

SEQ ID NO: 1034 - protein, 7 aa, Artificial Sequence
  Amino acid sequence derived from Murine monoclonal antibody and further modified by amino acid substitutions
DTRFLTS

SEQ ID NO: 1035 - protein, 7 aa, Artificial Sequence
  Amino acid sequence derived from Murine monoclonal antibody and further modified by amino acid substitutions
DTRFLDS

SEQ ID NO: 1036 - protein, 7 aa, Artificial Sequence
  Amino acid sequence derived from Murine monoclonal antibody and further modified by amino acid substitutions
DTRFHAS

SEQ ID NO: 1037 - protein, 7 aa, Artificial Sequence
  Amino acid sequence derived from Murine monoclonal antibody and further modified by amino acid substitutions
DTRFHSS

SEQ ID NO: 1038 - protein, 7 aa, Artificial Sequence
  Amino acid sequence derived from Murine monoclonal antibody and further modified by amino acid substitutions
DTRFHKS

SEQ ID NO: 1039 - protein, 7 aa, Artificial Sequence
  Amino acid sequence derived from Murine monoclonal antibody and further modified by amino acid substitutions
DTRFHRS

SEQ ID NO: 1040 - protein, 7 aa, Artificial Sequence
  Amino acid sequence derived from Murine monoclonal antibody and further modified by amino acid substitutions
DTRFHHS

SEQ ID NO: 1041 - protein, 7 aa, Artificial Sequence
  Amino acid sequence derived from Murine monoclonal antibody and further modified by amino acid substitutions
DTRFHPS

SEQ ID NO: 1042 - protein, 7 aa, Artificial Sequence
  Amino acid sequence derived from Murine monoclonal antibody and further modified by amino acid substitutions
DTRFHTS

SEQ ID NO: 1043 - protein, 7 aa, Artificial Sequence
  Amino acid sequence derived from Murine monoclonal antibody and further modified by amino acid substitutions
DTRFHDS

SEQ ID NO: 1044 - protein, 7 aa, Artificial Sequence
  Amino acid sequence derived from Murine monoclonal antibody and further modified by amino acid substitutions
DTRFQAS

SEQ ID NO: 1045 - protein, 7 aa, Artificial Sequence
  Amino acid sequence derived from Murine monoclonal antibody and further modified by amino acid substitutions
DTRFQSS

SEQ ID NO: 1046 - protein, 7 aa, Artificial Sequence
  Amino acid sequence derived from Murine monoclonal antibody and further modified by amino acid substitutions
DTRFQKS

SEQ ID NO: 1047 - protein, 7 aa, Artificial Sequence
  Amino acid sequence derived from Murine monoclonal antibody and further modified by amino acid substitutions
DTRFQRS

SEQ ID NO: 1048 - protein, 7 aa, Artificial Sequence
  Amino acid sequence derived from Murine monoclonal antibody and further modified by amino acid substitutions
DTRFQHS

SEQ ID NO: 1049 - protein, 7 aa, Artificial Sequence
  Amino acid sequence derived from Murine monoclonal antibody and further modified by amino acid substitutions
DTRFQPS

SEQ ID NO: 1050 - protein, 7 aa, Artificial Sequence
  Amino acid sequence derived from Murine monoclonal antibody and further modified by amino acid substitutions
DTRFQTS

SEQ ID NO: 1051 - protein, 7 aa, Artificial Sequence
  Amino acid sequence derived from Murine monoclonal antibody and further modified by amino acid substitutions
DTRFQDS

SEQ ID NO: 1052 - protein, 7 aa, Artificial Sequence
  Amino acid sequence derived from Murine monoclonal antibody and further modified by amino acid substitutions
DTRLLAS

SEQ ID NO: 1053 - protein, 7 aa, Artificial Sequence
  Amino acid sequence derived from Murine monoclonal antibody and further modified by amino acid substitutions
DTRLLSS

SEQ ID NO: 1054 - protein, 7 aa, Artificial Sequence
  Amino acid sequence derived from Murine monoclonal antibody and further modified by amino acid substitutions
DTRLLKS

SEQ ID NO: 1055 - protein, 7 aa, Artificial Sequence
  Amino acid sequence derived from Murine monoclonal antibody and further modified by amino acid substitutions
DTRLLRS

SEQ ID NO: 1056 - protein, 7 aa, Artificial Sequence
  Amino acid sequence derived from Murine monoclonal antibody and further modified by amino acid substitutions
DTRLLHS

SEQ ID NO: 1057 - protein, 7 aa, Artificial Sequence
  Amino acid sequence derived from Murine monoclonal antibody and further modified by amino acid substitutions
DTRLLPS

SEQ ID NO: 1058 - protein, 7 aa, Artificial Sequence
  Amino acid sequence derived from Murine monoclonal antibody and further modified by amino acid substitutions
DTRLLTS

SEQ ID NO: 1059 - protein, 7 aa, Artificial Sequence
  Amino acid sequence derived from Murine monoclonal antibody and further modified by amino acid substitutions
DTRLLDS

SEQ ID NO: 1060 - protein, 7 aa, Artificial Sequence
  Amino acid sequence derived from Murine monoclonal antibody and further modified by amino acid substitutions
DTRLHAS

SEQ ID NO: 1061 - protein, 7 aa, Artificial Sequence
  Amino acid sequence derived from Murine monoclonal antibody and further modified by amino acid substitutions
DTRLHSS

SEQ ID NO: 1062 - protein, 7 aa, Artificial Sequence
  Amino acid sequence derived from Murine monoclonal antibody and further modified by amino acid substitutions
DTRLHKS

SEQ ID NO: 1063 - protein, 7 aa, Artificial Sequence
  Amino acid sequence derived from Murine monoclonal antibody and further modified by amino acid substitutions
DTRLHRS

SEQ ID NO: 1064 - protein, 7 aa, Artificial Sequence
  Amino acid sequence derived from Murine monoclonal antibody and further modified by amino acid substitutions
DTRLHHS

SEQ ID NO: 1065 - protein, 7 aa, Artificial Sequence
  Amino acid sequence derived from Murine monoclonal antibody and further modified by amino acid substitutions
DTRLHPS

SEQ ID NO: 1066 - protein, 7 aa, Artificial Sequence
  Amino acid sequence derived from Murine monoclonal antibody and further modified by amino acid substitutions
DTRLHTS

SEQ ID NO: 1067 - protein, 7 aa, Artificial Sequence
  Amino acid sequence derived from Murine monoclonal antibody and further modified by amino acid substitutions
DTRLHDS

SEQ ID NO: 1068 - protein, 7 aa, Artificial Sequence
  Amino acid sequence derived from Murine monoclonal antibody and further modified by amino acid substitutions
DTRLQAS

SEQ ID NO: 1069 - protein, 7 aa, Artificial Sequence
  Amino acid sequence derived from Murine monoclonal antibody and further modified by amino acid substitutions
DTRLQSS

SEQ ID NO: 1070 - protein, 7 aa, Artificial Sequence
  Amino acid sequence derived from Murine monoclonal antibody and further modified by amino acid substitutions
DTRLQKS

SEQ ID NO: 1071 - protein, 7 aa, Artificial Sequence
  Amino acid sequence derived from Murine monoclonal antibody and further modified by amino acid substitutions
DTRLQRS

SEQ ID NO: 1072 - protein, 7 aa, Artificial Sequence
  Amino acid sequence derived from Murine monoclonal antibody and further modified by amino acid substitutions
DTRLQHS

SEQ ID NO: 1073 - protein, 7 aa, Artificial Sequence
  Amino acid sequence derived from Murine monoclonal antibody and further modified by amino acid substitutions
DTRLQPS

SEQ ID NO: 1074 - protein, 7 aa, Artificial Sequence
  Amino acid sequence derived from Murine monoclonal antibody and further modified by amino acid substitutions
DTRLQTS

SEQ ID NO: 1075 - protein, 7 aa, Artificial Sequence
  Amino acid sequence derived from Murine monoclonal antibody and further modified by amino acid substitutions
DTRLQDS

SEQ ID NO: 1076 - protein, 7 aa, Artificial Sequence
  Amino acid sequence derived from Murine monoclonal antibody and further modified by amino acid substitutions
DTMKLKS

SEQ ID NO: 1077 - protein, 7 aa, Artificial Sequence
  Amino acid sequence derived from Murine monoclonal antibody and further modified by amino acid substitutions
DTMKLRS

SEQ ID NO: 1078 - protein, 7 aa, Artificial Sequence
  Amino acid sequence derived from Murine monoclonal antibody and further modified by amino acid substitutions
DTMKLHS

SEQ ID NO: 1079 - protein, 7 aa, Artificial Sequence
  Amino acid sequence derived from Murine monoclonal antibody and further modified by amino acid substitutions
DTMKLPS

SEQ ID NO: 1080 - protein, 7 aa, Artificial Sequence
  Amino acid sequence derived from Murine monoclonal antibody and further modified by amino acid substitutions
DTMKLTS

SEQ ID NO: 1081 - protein, 7 aa, Artificial Sequence
  Amino acid sequence derived from Murine monoclonal antibody and further modified by amino acid substitutions
DTMKLDS

SEQ ID NO: 1082 - protein, 7 aa, Artificial Sequence
  Amino acid sequence derived from Murine monoclonal antibody and further modified by amino acid substitutions
DTMKHAS

SEQ ID NO: 1083 - protein, 7 aa, Artificial Sequence
  Amino acid sequence derived from Murine monoclonal antibody and further modified by amino acid substitutions
DTMKHSS

SEQ ID NO: 1084 - protein, 7 aa, Artificial Sequence
  Amino acid sequence derived from Murine monoclonal antibody and further modified by amino acid substitutions
DTMKHKS

SEQ ID NO: 1085 - protein, 7 aa, Artificial Sequence
  Amino acid sequence derived from Murine monoclonal antibody and further modified by amino acid substitutions
DTMKHRS

SEQ ID NO: 1086 - protein, 7 aa, Artificial Sequence
  Amino acid sequence derived from Murine monoclonal antibody and further modified by amino acid substitutions
DTMKHHS

SEQ ID NO: 1087 - protein, 7 aa, Artificial Sequence
  Amino acid sequence derived from Murine monoclonal antibody and further modified by amino acid substitutions
DTMKHPS

SEQ ID NO: 1088 - protein, 7 aa, Artificial Sequence
  Amino acid sequence derived from Murine monoclonal antibody and further modified by amino acid substitutions
DTMKHTS

SEQ ID NO: 1089 - protein, 7 aa, Artificial Sequence
  Amino acid sequence derived from Murine monoclonal antibody and further modified by amino acid substitutions
DTMKHDS

SEQ ID NO: 1090 - protein, 7 aa, Artificial Sequence
  Amino acid sequence derived from Murine monoclonal antibody and further modified by amino acid substitutions
DTMKQKS

SEQ ID NO: 1091 - protein, 7 aa, Artificial Sequence
  Amino acid sequence derived from Murine monoclonal antibody and further modified by amino acid substitutions
DTMKQRS

SEQ ID NO: 1092 - protein, 7 aa, Artificial Sequence
  Amino acid sequence derived from Murine monoclonal antibody and further modified by amino acid substitutions
DTMKQHS

SEQ ID NO: 1093 - protein, 7 aa, Artificial Sequence
  Amino acid sequence derived from Murine monoclonal antibody and further modified by amino acid substitutions
DTMKQPS

SEQ ID NO: 1094 - protein, 7 aa, Artificial Sequence
  Amino acid sequence derived from Murine monoclonal antibody and further modified by amino acid substitutions
DTMKQTS

SEQ ID NO: 1095 - protein, 7 aa, Artificial Sequence
  Amino acid sequence derived from Murine monoclonal antibody and further modified by amino acid substitutions
DTMKQDS

SEQ ID NO: 1096 - protein, 7 aa, Artificial Sequence
  Amino acid sequence derived from Murine monoclonal antibody and further modified by amino acid substitutions
DTMGLAS

SEQ ID NO: 1097 - protein, 7 aa, Artificial Sequence
  Amino acid sequence derived from Murine monoclonal antibody and further modified by amino acid substitutions
DTMGLSS

SEQ ID NO: 1098 - protein, 7 aa, Artificial Sequence
  Amino acid sequence derived from Murine monoclonal antibody and further modified by amino acid substitutions
DTMGLKS

SEQ ID NO: 1099 - protein, 7 aa, Artificial Sequence
  Amino acid sequence derived from Murine monoclonal antibody and further modified by amino acid substitutions
DTMGLRS

SEQ ID NO: 1100 - protein, 7 aa, Artificial Sequence
  Amino acid sequence derived from Murine monoclonal antibody and further modified by amino acid substitutions
DTMGLHS

SEQ ID NO: 1101 - protein, 7 aa, Artificial Sequence
  Amino acid sequence derived from Murine monoclonal antibody and further modified by amino acid substitutions
DTMGLPS

SEQ ID NO: 1102 - protein, 7 aa, Artificial Sequence
  Amino acid sequence derived from Murine monoclonal antibody and further modified by amino acid substitutions
DTMGLTS

SEQ ID NO: 1103 - protein, 7 aa, Artificial Sequence
  Amino acid sequence derived from Murine monoclonal antibody and further modified by amino acid substitutions
DTMGLDS

SEQ ID NO: 1104 - protein, 7 aa, Artificial Sequence
  Amino acid sequence derived from Murine monoclonal antibody and further modified by amino acid substitutions
DTMGHAS

SEQ ID NO: 1105 - protein, 7 aa, Artificial Sequence
  Amino acid sequence derived from Murine monoclonal antibody and further modified by amino acid substitutions
DTMGHSS

SEQ ID NO: 1106 - protein, 7 aa, Artificial Sequence
  Amino acid sequence derived from Murine monoclonal antibody and further modified by amino acid substitutions
DTMGHKS

SEQ ID NO: 1107 - protein, 7 aa, Artificial Sequence
  Amino acid sequence derived from Murine monoclonal antibody and further modified by amino acid substitutions
DTMGHRS

SEQ ID NO: 1108 - protein, 7 aa, Artificial Sequence
  Amino acid sequence derived from Murine monoclonal antibody and further modified by amino acid substitutions
DTMGHHS

SEQ ID NO: 1109 - protein, 7 aa, Artificial Sequence
  Amino acid sequence derived from Murine monoclonal antibody and further modified by amino acid substitutions
DTMGHPS

SEQ ID NO: 1110 - protein, 7 aa, Artificial Sequence
  Amino acid sequence derived from Murine monoclonal antibody and further modified by amino acid substitutions
DTMGHTS

SEQ ID NO: 1111 - protein, 7 aa, Artificial Sequence
  Amino acid sequence derived from Murine monoclonal antibody and further modified by amino acid substitutions
DTMGHDS

SEQ ID NO: 1112 - protein, 7 aa, Artificial Sequence
  Amino acid sequence derived from Murine monoclonal antibody and further modified by amino acid substitutions
DTMGQAS

SEQ ID NO: 1113 - protein, 7 aa, Artificial Sequence
  Amino acid sequence derived from Murine monoclonal antibody and further modified by amino acid substitutions
DTMGQSS

SEQ ID NO: 1114 - protein, 7 aa, Artificial Sequence
  Amino acid sequence derived from Murine monoclonal antibody and further modified by amino acid substitutions
DTMGQKS

SEQ ID NO: 1115 - protein, 7 aa, Artificial Sequence
  Amino acid sequence derived from Murine monoclonal antibody and further modified by amino acid substitutions
DTMGQRS

SEQ ID NO: 1116 - protein, 7 aa, Artificial Sequence
  Amino acid sequence derived from Murine monoclonal antibody and further modified by amino acid substitutions
DTMGQHS

SEQ ID NO: 1117 - protein, 7 aa, Artificial Sequence
  Amino acid sequence derived from Murine monoclonal antibody and further modified by amino acid substitutions
DTMGQPS

SEQ ID NO: 1118 - protein, 7 aa, Artificial Sequence
  Amino acid sequence derived from Murine monoclonal antibody and further modified by amino acid substitutions
DTMGQTS

SEQ ID NO: 1119 - protein, 7 aa, Artificial Sequence
  Amino acid sequence derived from Murine monoclonal antibody and further modified by amino acid substitutions
DTMGQDS

SEQ ID NO: 1120 - protein, 7 aa, Artificial Sequence
  Amino acid sequence derived from Murine monoclonal antibody and further modified by amino acid substitutions
DTMRLSS

SEQ ID NO: 1121 - protein, 7 aa, Artificial Sequence
  Amino acid sequence derived from Murine monoclonal antibody and further modified by amino acid substitutions
DTMRLKS

SEQ ID NO: 1122 - protein, 7 aa, Artificial Sequence
  Amino acid sequence derived from Murine monoclonal antibody and further modified by amino acid substitutions
DTMRLRS

SEQ ID NO: 1123 - protein, 7 aa, Artificial Sequence
  Amino acid sequence derived from Murine monoclonal antibody and further modified by amino acid substitutions
DTMRLHS

SEQ ID NO: 1124 - protein, 7 aa, Artificial Sequence
  Amino acid sequence derived from Murine monoclonal antibody and further modified by amino acid substitutions
DTMRLPS

SEQ ID NO: 1125 - protein, 7 aa, Artificial Sequence
  Amino acid sequence derived from Murine monoclonal antibody and further modified by amino acid substitutions
DTMRLTS

SEQ ID NO: 1126 - protein, 7 aa, Artificial Sequence
  Amino acid sequence derived from Murine monoclonal antibody and further modified by amino acid substitutions
DTMRLDS

SEQ ID NO: 1127 - protein, 7 aa, Artificial Sequence
  Amino acid sequence derived from Murine monoclonal antibody and further modified by amino acid substitutions
DTMRHAS

SEQ ID NO: 1128 - protein, 7 aa, Artificial Sequence
  Amino acid sequence derived from Murine monoclonal antibody and further modified by amino acid substitutions
DTMRHSS

SEQ ID NO: 1129 - protein, 7 aa, Artificial Sequence
  Amino acid sequence derived from Murine monoclonal antibody and further modified by amino acid substitutions
DTMRHKS

SEQ ID NO: 1130 - protein, 7 aa, Artificial Sequence
  Amino acid sequence derived from Murine monoclonal antibody and further modified by amino acid substitutions
DTMRHRS

SEQ ID NO: 1131 - protein, 7 aa, Artificial Sequence
  Amino acid sequence derived from Murine monoclonal antibody and further modified by amino acid substitutions
DTMRHHS

SEQ ID NO: 1132 - protein, 7 aa, Artificial Sequence
  Amino acid sequence derived from Murine monoclonal antibody and further modified by amino acid substitutions
DTMRHPS

SEQ ID NO: 1133 - protein, 7 aa, Artificial Sequence
  Amino acid sequence derived from Murine monoclonal antibody and further modified by amino acid substitutions
DTMRHTS

SEQ ID NO: 1134 - protein, 7 aa, Artificial Sequence
  Amino acid sequence derived from Murine monoclonal antibody and further modified by amino acid substitutions
DTMRHDS

SEQ ID NO: 1135 - protein, 7 aa, Artificial Sequence
  Amino acid sequence derived from Murine monoclonal antibody and further modified by amino acid substitutions
DTMRQAS

SEQ ID NO: 1136 - protein, 7 aa, Artificial Sequence
  Amino acid sequence derived from Murine monoclonal antibody and further modified by amino acid substitutions
DTMRQSS

SEQ ID NO: 1137 - protein, 7 aa, Artificial Sequence
  Amino acid sequence derived from Murine monoclonal antibody and further modified by amino acid substitutions
DTMRQKS

SEQ ID NO: 1138 - protein, 7 aa, Artificial Sequence
  Amino acid sequence derived from Murine monoclonal antibody and further modified by amino acid substitutions
DTMRQRS

SEQ ID NO: 1139 - protein, 7 aa, Artificial Sequence
  Amino acid sequence derived from Murine monoclonal antibody and further modified by amino acid substitutions
DTMRQHS

SEQ ID NO: 1140 - protein, 7 aa, Artificial Sequence
  Amino acid sequence derived from Murine monoclonal antibody and further modified by amino acid substitutions
DTMRQPS

SEQ ID NO: 1141 - protein, 7 aa, Artificial Sequence
  Amino acid sequence derived from Murine monoclonal antibody and further modified by amino acid substitutions
DTMRQTS

SEQ ID NO: 1142 - protein, 7 aa, Artificial Sequence
  Amino acid sequence derived from Murine monoclonal antibody and further modified by amino acid substitutions
DTMRQDS

SEQ ID NO: 1143 - protein, 7 aa, Artificial Sequence
  Amino acid sequence derived from Murine monoclonal antibody and further modified by amino acid substitutions
DTMYLKS

SEQ ID NO: 1144 - protein, 7 aa, Artificial Sequence
  Amino acid sequence derived from Murine monoclonal antibody and further modified by amino acid substitutions
DTMYLRS

SEQ ID NO: 1145 - protein, 7 aa, Artificial Sequence
  Amino acid sequence derived from Murine monoclonal antibody and further modified by amino acid substitutions
DTMYLHS

SEQ ID NO: 1146 - protein, 7 aa, Artificial Sequence
  Amino acid sequence derived from Murine monoclonal antibody and further modified by amino acid substitutions
DTMYLPS

SEQ ID NO: 1147 - protein, 7 aa, Artificial Sequence
  Amino acid sequence derived from Murine monoclonal antibody and further modified by amino acid substitutions
DTMYLTS

SEQ ID NO: 1148 - protein, 7 aa, Artificial Sequence
  Amino acid sequence derived from Murine monoclonal antibody and further modified by amino acid substitutions
DTMYLDS

SEQ ID NO: 1149 - protein, 7 aa, Artificial Sequence
  Amino acid sequence derived from Murine monoclonal antibody and further modified by amino acid substitutions
DTMYHAS

SEQ ID NO: 1150 - protein, 7 aa, Artificial Sequence
  Amino acid sequence derived from Murine monoclonal antibody and further modified by amino acid substitutions
DTMYHSS

SEQ ID NO: 1151 - protein, 7 aa, Artificial Sequence
  Amino acid sequence derived from Murine monoclonal antibody and further modified by amino acid substitutions
DTMYHKS

SEQ ID NO: 1152 - protein, 7 aa, Artificial Sequence
  Amino acid sequence derived from Murine monoclonal antibody and further modified by amino acid substitutions
DTMYHRS

SEQ ID NO: 1153 - protein, 7 aa, Artificial Sequence
  Amino acid sequence derived from Murine monoclonal antibody and further modified by amino acid substitutions
DTMYHHS

SEQ ID NO: 1154 - protein, 7 aa, Artificial Sequence
  Amino acid sequence derived from Murine monoclonal antibody and further modified by amino acid substitutions
DTMYHPS

SEQ ID NO: 1155 - protein, 7 aa, Artificial Sequence
  Amino acid sequence derived from Murine monoclonal antibody and further modified by amino acid substitutions
DTMYHTS

SEQ ID NO: 1156 - protein, 7 aa, Artificial Sequence
  Amino acid sequence derived from Murine monoclonal antibody and further modified by amino acid substitutions
DTMYHDS

SEQ ID NO: 1157 - protein, 7 aa, Artificial Sequence
  Amino acid sequence derived from Murine monoclonal antibody and further modified by amino acid substitutions
DTMYQKS

SEQ ID NO: 1158 - protein, 7 aa, Artificial Sequence
  Amino acid sequence derived from Murine monoclonal antibody and further modified by amino acid substitutions
DTMYQRS

SEQ ID NO: 1159 - protein, 7 aa, Artificial Sequence
  Amino acid sequence derived from Murine monoclonal antibody and further modified by amino acid substitutions
DTMYQHS

SEQ ID NO: 1160 - protein, 7 aa, Artificial Sequence
  Amino acid sequence derived from Murine monoclonal antibody and further modified by amino acid substitutions
DTMYQPS

SEQ ID NO: 1161 - protein, 7 aa, Artificial Sequence
  Amino acid sequence derived from Murine monoclonal antibody and further modified by amino acid substitutions
DTMYQTS

SEQ ID NO: 1162 - protein, 7 aa, Artificial Sequence
  Amino acid sequence derived from Murine monoclonal antibody and further modified by amino acid substitutions
DTMYQDS

SEQ ID NO: 1163 - protein, 7 aa, Artificial Sequence
  Amino acid sequence derived from Murine monoclonal antibody and further modified by amino acid substitutions
DTMFLAS

SEQ ID NO: 1164 - protein, 7 aa, Artificial Sequence
  Amino acid sequence derived from Murine monoclonal antibody and further modified by amino acid substitutions
DTMFLSS

SEQ ID NO: 1165 - protein, 7 aa, Artificial Sequence
  Amino acid sequence derived from Murine monoclonal antibody and further modified by amino acid substitutions
DTMFLKS

SEQ ID NO: 1166 - protein, 7 aa, Artificial Sequence
  Amino acid sequence derived from Murine monoclonal antibody and further modified by amino acid substitutions
DTMFLRS

SEQ ID NO: 1167 - protein, 7 aa, Artificial Sequence
  Amino acid sequence derived from Murine monoclonal antibody and further modified by amino acid substitutions
DTMFLHS

SEQ ID NO: 1168 - protein, 7 aa, Artificial Sequence
  Amino acid sequence derived from Murine monoclonal antibody and further modified by amino acid substitutions
DTMFLPS

SEQ ID NO: 1169 - protein, 7 aa, Artificial Sequence
  Amino acid sequence derived from Murine monoclonal antibody and further modified by amino acid substitutions
DTMFLTS

SEQ ID NO: 1170 - protein, 7 aa, Artificial Sequence
  Amino acid sequence derived from Murine monoclonal antibody and further modified by amino acid substitutions
DTMFLDS

SEQ ID NO: 1171 - protein, 7 aa, Artificial Sequence
  Amino acid sequence derived from Murine monoclonal antibody and further modified by amino acid substitutions
DTMFHAS

SEQ ID NO: 1172 - protein, 7 aa, Artificial Sequence
  Amino acid sequence derived from Murine monoclonal antibody and further modified by amino acid substitutions
DTMFHSS

SEQ ID NO: 1173 - protein, 7 aa, Artificial Sequence
  Amino acid sequence derived from Murine monoclonal antibody and further modified by amino acid substitutions
DTMFHKS

SEQ ID NO: 1174 - protein, 7 aa, Artificial Sequence
  Amino acid sequence derived from Murine monoclonal antibody and further modified by amino acid substitutions
DTMFHRS

SEQ ID NO: 1175 - protein, 7 aa, Artificial Sequence
  Amino acid sequence derived from Murine monoclonal antibody and further modified by amino acid substitutions
DTMFHHS

SEQ ID NO: 1176 - protein, 7 aa, Artificial Sequence
  Amino acid sequence derived from Murine monoclonal antibody and further modified by amino acid substitutions
DTMFHPS

SEQ ID NO: 1177 - protein, 7 aa, Artificial Sequence
  Amino acid sequence derived from Murine monoclonal antibody and further modified by amino acid substitutions
DTMFHTS

SEQ ID NO: 1178 - protein, 7 aa, Artificial Sequence
  Amino acid sequence derived from Murine monoclonal antibody and further modified by amino acid substitutions
DTMFHDS

SEQ ID NO: 1179 - protein, 7 aa, Artificial Sequence
  Amino acid sequence derived from Murine monoclonal antibody and further modified by amino acid substitutions
DTMFQAS

SEQ ID NO: 1180 - protein, 7 aa, Artificial Sequence
  Amino acid sequence derived from Murine monoclonal antibody and further modified by amino acid substitutions
DTMFQSS

SEQ ID NO: 1181 - protein, 7 aa, Artificial Sequence
  Amino acid sequence derived from Murine monoclonal antibody and further modified by amino acid substitutions
DTMFQKS

SEQ ID NO: 1182 - protein, 7 aa, Artificial Sequence
  Amino acid sequence derived from Murine monoclonal antibody and further modified by amino acid substitutions
DTMFQRS

SEQ ID NO: 1183 - protein, 7 aa, Artificial Sequence
  Amino acid sequence derived from Murine monoclonal antibody and further modified by amino acid substitutions
DTMFQHS

SEQ ID NO: 1184 - protein, 7 aa, Artificial Sequence
  Amino acid sequence derived from Murine monoclonal antibody and further modified by amino acid substitutions
DTMFQPS

SEQ ID NO: 1185 - protein, 7 aa, Artificial Sequence
  Amino acid sequence derived from Murine monoclonal antibody and further modified by amino acid substitutions
DTMFQTS

SEQ ID NO: 1186 - protein, 7 aa, Artificial Sequence
  Amino acid sequence derived from Murine monoclonal antibody and further modified by amino acid substitutions
DTMFQDS

SEQ ID NO: 1187 - protein, 7 aa, Artificial Sequence
  Amino acid sequence derived from Murine monoclonal antibody and further modified by amino acid substitutions
DTMLLAS

SEQ ID NO: 1188 - protein, 7 aa, Artificial Sequence
  Amino acid sequence derived from Murine monoclonal antibody and further modified by amino acid substitutions
DTMLLSS

SEQ ID NO: 1189 - protein, 7 aa, Artificial Sequence
  Amino acid sequence derived from Murine monoclonal antibody and further modified by amino acid substitutions
DTMLLKS

SEQ ID NO: 1190 - protein, 7 aa, Artificial Sequence
  Amino acid sequence derived from Murine monoclonal antibody and further modified by amino acid substitutions
DTMLLRS

SEQ ID NO: 1191 - protein, 7 aa, Artificial Sequence
  Amino acid sequence derived from Murine monoclonal antibody and further modified by amino acid substitutions
DTMLLHS

SEQ ID NO: 1192 - protein, 7 aa, Artificial Sequence
  Amino acid sequence derived from Murine monoclonal antibody and further modified by amino acid substitutions
DTMLLPS

SEQ ID NO: 1193 - protein, 7 aa, Artificial Sequence
  Amino acid sequence derived from Murine monoclonal antibody and further modified by amino acid substitutions
DTMLLTS

SEQ ID NO: 1194 - protein, 7 aa, Artificial Sequence
  Amino acid sequence derived from Murine monoclonal antibody and further modified by amino acid substitutions
DTMLLDS

SEQ ID NO: 1195 - protein, 7 aa, Artificial Sequence
  Amino acid sequence derived from Murine monoclonal antibody and further modified by amino acid substitutions
DTMLHAS

SEQ ID NO: 1196 - protein, 7 aa, Artificial Sequence
  Amino acid sequence derived from Murine monoclonal antibody and further modified by amino acid substitutions
DTMLHSS

SEQ ID NO: 1197 - protein, 7 aa, Artificial Sequence
  Amino acid sequence derived from Murine monoclonal antibody and further modified by amino acid substitutions
DTMLHKS

SEQ ID NO: 1198 - protein, 7 aa, Artificial Sequence
  Amino acid sequence derived from Murine monoclonal antibody and further modified by amino acid substitutions
DTMLHRS

SEQ ID NO: 1199 - protein, 7 aa, Artificial Sequence
  Amino acid sequence derived from Murine monoclonal antibody and further modified by amino acid substitutions
DTMLHHS

SEQ ID NO: 1200 - protein, 7 aa, Artificial Sequence
  Amino acid sequence derived from Murine monoclonal antibody and further modified by amino acid substitutions
DTMLHPS

SEQ ID NO: 1201 - protein, 7 aa, Artificial Sequence
  Amino acid sequence derived from Murine monoclonal antibody and further modified by amino acid substitutions
DTMLHTS

SEQ ID NO: 1202 - protein, 7 aa, Artificial Sequence
  Amino acid sequence derived from Murine monoclonal antibody and further modified by amino acid substitutions
DTMLHDS

SEQ ID NO: 1203 - protein, 7 aa, Artificial Sequence
  Amino acid sequence derived from Murine monoclonal antibody and further modified by amino acid substitutions
DTMLQAS

SEQ ID NO: 1204 - protein, 7 aa, Artificial Sequence
  Amino acid sequence derived from Murine monoclonal antibody and further modified by amino acid substitutions
DTMLQSS

SEQ ID NO: 1205 - protein, 7 aa, Artificial Sequence
  Amino acid sequence derived from Murine monoclonal antibody and further modified by amino acid substitutions
DTMLQKS

SEQ ID NO: 1206 - protein, 7 aa, Artificial Sequence
  Amino acid sequence derived from Murine monoclonal antibody and further modified by amino acid substitutions
DTMLQRS

SEQ ID NO: 1207 - protein, 7 aa, Artificial Sequence
  Amino acid sequence derived from Murine monoclonal antibody and further modified by amino acid substitutions
DTMLQHS

SEQ ID NO: 1208 - protein, 7 aa, Artificial Sequence
  Amino acid sequence derived from Murine monoclonal antibody and further modified by amino acid substitutions
DTMLQPS

SEQ ID NO: 1209 - protein, 7 aa, Artificial Sequence
  Amino acid sequence derived from Murine monoclonal antibody and further modified by amino acid substitutions
DTMLQTS

SEQ ID NO: 1210 - protein, 7 aa, Artificial Sequence
  Amino acid sequence derived from Murine monoclonal antibody and further modified by amino acid substitutions
DTMLQDS

SEQ ID NO: 1211 - protein, 7 aa, Artificial Sequence
  Amino acid sequence derived from Murine monoclonal antibody and further modified by amino acid substitutions
DTKKLAS

SEQ ID NO: 1212 - protein, 7 aa, Artificial Sequence
  Amino acid sequence derived from Murine monoclonal antibody and further modified by amino acid substitutions
DTKKLSS

SEQ ID NO: 1213 - protein, 7 aa, Artificial Sequence
  Amino acid sequence derived from Murine monoclonal antibody and further modified by amino acid substitutions
DTKKLKS

SEQ ID NO: 1214 - protein, 7 aa, Artificial Sequence
  Amino acid sequence derived from Murine monoclonal antibody and further modified by amino acid substitutions
DTKKLRS

SEQ ID NO: 1215 - protein, 7 aa, Artificial Sequence
  Amino acid sequence derived from Murine monoclonal antibody and further modified by amino acid substitutions
DTKKLHS

SEQ ID NO: 1216 - protein, 7 aa, Artificial Sequence
  Amino acid sequence derived from Murine monoclonal antibody and further modified by amino acid substitutions
DTKKLPS

SEQ ID NO: 1217 - protein, 7 aa, Artificial Sequence
  Amino acid sequence derived from Murine monoclonal antibody and further modified by amino acid substitutions
DTKKLTS

SEQ ID NO: 1218 - protein, 7 aa, Artificial Sequence
  Amino acid sequence derived from Murine monoclonal antibody and further modified by amino acid substitutions
DTKKLDS

SEQ ID NO: 1219 - protein, 7 aa, Artificial Sequence
  Amino acid sequence derived from Murine monoclonal antibody and further modified by amino acid substitutions
DTKKHAS

SEQ ID NO: 1220 - protein, 7 aa, Artificial Sequence
  Amino acid sequence derived from Murine monoclonal antibody and further modified by amino acid substitutions
DTKKHSS

SEQ ID NO: 1221 - protein, 7 aa, Artificial Sequence
  Amino acid sequence derived from Murine monoclonal antibody and further modified by amino acid substitutions
DTKKHKS

SEQ ID NO: 1222 - protein, 7 aa, Artificial Sequence
  Amino acid sequence derived from Murine monoclonal antibody and further modified by amino acid substitutions
DTKKHRS

SEQ ID NO: 1223 - protein, 7 aa, Artificial Sequence
  Amino acid sequence derived from Murine monoclonal antibody and further modified by amino acid substitutions
DTKKHHS

SEQ ID NO: 1224 - protein, 7 aa, Artificial Sequence
  Amino acid sequence derived from Murine monoclonal antibody and further modified by amino acid substitutions
DTKKHPS

SEQ ID NO: 1225 - protein, 7 aa, Artificial Sequence
  Amino acid sequence derived from Murine monoclonal antibody and further modified by amino acid substitutions
DTKKHTS

SEQ ID NO: 1226 - protein, 7 aa, Artificial Sequence
  Amino acid sequence derived from Murine monoclonal antibody and further modified by amino acid substitutions
DTKKHDS

SEQ ID NO: 1227 - protein, 7 aa, Artificial Sequence
  Amino acid sequence derived from Murine monoclonal antibody and further modified by amino acid substitutions
DTKKQAS

SEQ ID NO: 1228 - protein, 7 aa, Artificial Sequence
  Amino acid sequence derived from Murine monoclonal antibody and further modified by amino acid substitutions
DTKKQSS

SEQ ID NO: 1229 - protein, 7 aa, Artificial Sequence
  Amino acid sequence derived from Murine monoclonal antibody and further modified by amino acid substitutions
DTKKQKS

SEQ ID NO: 1230 - protein, 7 aa, Artificial Sequence
  Amino acid sequence derived from Murine monoclonal antibody and further modified by amino acid substitutions
DTKKQRS

SEQ ID NO: 1231 - protein, 7 aa, Artificial Sequence
  Amino acid sequence derived from Murine monoclonal antibody and further modified by amino acid substitutions
DTKKQHS

SEQ ID NO: 1232 - protein, 7 aa, Artificial Sequence
  Amino acid sequence derived from Murine monoclonal antibody and further modified by amino acid substitutions
DTKKQPS

SEQ ID NO: 1233 - protein, 7 aa, Artificial Sequence
  Amino acid sequence derived from Murine monoclonal antibody and further modified by amino acid substitutions
DTKKQTS

SEQ ID NO: 1234 - protein, 7 aa, Artificial Sequence
  Amino acid sequence derived from Murine monoclonal antibody and further modified by amino acid substitutions
DTKKQDS

SEQ ID NO: 1235 - protein, 7 aa, Artificial Sequence
  Amino acid sequence derived from Murine monoclonal antibody and further modified by amino acid substitutions
DTKGLAS

SEQ ID NO: 1236 - protein, 7 aa, Artificial Sequence
  Amino acid sequence derived from Murine monoclonal antibody and further modified by amino acid substitutions
DTKGLSS

SEQ ID NO: 1237 - protein, 7 aa, Artificial Sequence
  Amino acid sequence derived from Murine monoclonal antibody and further modified by amino acid substitutions
DTKGLKS

SEQ ID NO: 1238 - protein, 7 aa, Artificial Sequence
  Amino acid sequence derived from Murine monoclonal antibody and further modified by amino acid substitutions
DTKGLRS

SEQ ID NO: 1239 - protein, 7 aa, Artificial Sequence
  Amino acid sequence derived from Murine monoclonal antibody and further modified by amino acid substitutions
DTKGLHS

SEQ ID NO: 1240 - protein, 7 aa, Artificial Sequence
  Amino acid sequence derived from Murine monoclonal antibody and further modified by amino acid substitutions
DTKGLPS

SEQ ID NO: 1241 - protein, 7 aa, Artificial Sequence
  Amino acid sequence derived from Murine monoclonal antibody and further modified by amino acid substitutions
DTKGLTS

SEQ ID NO: 1242 - protein, 7 aa, Artificial Sequence
  Amino acid sequence derived from Murine monoclonal antibody and further modified by amino acid substitutions
DTKGLDS

SEQ ID NO: 1243 - protein, 7 aa, Artificial Sequence
  Amino acid sequence derived from Murine monoclonal antibody and further modified by amino acid substitutions
DTKGHAS

SEQ ID NO: 1244 - protein, 7 aa, Artificial Sequence
  Amino acid sequence derived from Murine monoclonal antibody and further modified by amino acid substitutions
DTKGHSS

SEQ ID NO: 1245 - protein, 7 aa, Artificial Sequence
  Amino acid sequence derived from Murine monoclonal antibody and further modified by amino acid substitutions
DTKGHKS

SEQ ID NO: 1246 - protein, 7 aa, Artificial Sequence
  Amino acid sequence derived from Murine monoclonal antibody and further modified by amino acid substitutions
DTKGHRS

SEQ ID NO: 1247 - protein, 7 aa, Artificial Sequence
  Amino acid sequence derived from Murine monoclonal antibody and further modified by amino acid substitutions
DTKGHHS

SEQ ID NO: 1248 - protein, 7 aa, Artificial Sequence
  Amino acid sequence derived from Murine monoclonal antibody and further modified by amino acid substitutions
DTKGHPS

SEQ ID NO: 1249 - protein, 7 aa, Artificial Sequence
  Amino acid sequence derived from Murine monoclonal antibody and further modified by amino acid substitutions
DTKGHTS

SEQ ID NO: 1250 - protein, 7 aa, Artificial Sequence
  Amino acid sequence derived from Murine monoclonal antibody and further modified by amino acid substitutions
DTKGHDS

SEQ ID NO: 1251 - protein, 7 aa, Artificial Sequence
  Amino acid sequence derived from Murine monoclonal antibody and further modified by amino acid substitutions
DTKGQAS

SEQ ID NO: 1252 - protein, 7 aa, Artificial Sequence
  Amino acid sequence derived from Murine monoclonal antibody and further modified by amino acid substitutions
DTKGQSS

SEQ ID NO: 1253 - protein, 7 aa, Artificial Sequence
  Amino acid sequence derived from Murine monoclonal antibody and further modified by amino acid substitutions
DTKGQKS

SEQ ID NO: 1254 - protein, 7 aa, Artificial Sequence
  Amino acid sequence derived from Murine monoclonal antibody and further modified by amino acid substitutions
DTKGQRS

SEQ ID NO: 1255 - protein, 7 aa, Artificial Sequence
  Amino acid sequence derived from Murine monoclonal antibody and further modified by amino acid substitutions
DTKGQHS

SEQ ID NO: 1256 - protein, 7 aa, Artificial Sequence
  Amino acid sequence derived from Murine monoclonal antibody and further modified by amino acid substitutions
DTKGQPS

SEQ ID NO: 1257 - protein, 7 aa, Artificial Sequence
  Amino acid sequence derived from Murine monoclonal antibody and further modified by amino acid substitutions
DTKGQTS

SEQ ID NO: 1258 - protein, 7 aa, Artificial Sequence
  Amino acid sequence derived from Murine monoclonal antibody and further modified by amino acid substitutions
DTKGQDS

SEQ ID NO: 1259 - protein, 7 aa, Artificial Sequence
  Amino acid sequence derived from Murine monoclonal antibody and further modified by amino acid substitutions
DTKRLAS

SEQ ID NO: 1260 - protein, 7 aa, Artificial Sequence
  Amino acid sequence derived from Murine monoclonal antibody and further modified by amino acid substitutions
DTKRLSS

SEQ ID NO: 1261 - protein, 7 aa, Artificial Sequence
  Amino acid sequence derived from Murine monoclonal antibody and further modified by amino acid substitutions
DTKRLKS

SEQ ID NO: 1262 - protein, 7 aa, Artificial Sequence
  Amino acid sequence derived from Murine monoclonal antibody and further modified by amino acid substitutions
DTKRLRS

SEQ ID NO: 1263 - protein, 7 aa, Artificial Sequence
  Amino acid sequence derived from Murine monoclonal antibody and further modified by amino acid substitutions
DTKRLHS

SEQ ID NO: 1264 - protein, 7 aa, Artificial Sequence
  Amino acid sequence derived from Murine monoclonal antibody and further modified by amino acid substitutions
DTKRLPS

SEQ ID NO: 1265 - protein, 7 aa, Artificial Sequence
  Amino acid sequence derived from Murine monoclonal antibody and further modified by amino acid substitutions
DTKRLTS

SEQ ID NO: 1266 - protein, 7 aa, Artificial Sequence
  Amino acid sequence derived from Murine monoclonal antibody and further modified by amino acid substitutions
DTKRLDS

SEQ ID NO: 1267 - protein, 7 aa, Artificial Sequence
  Amino acid sequence derived from Murine monoclonal antibody and further modified by amino acid substitutions
DTKRHAS

SEQ ID NO: 1268 - protein, 7 aa, Artificial Sequence
  Amino acid sequence derived from Murine monoclonal antibody and further modified by amino acid substitutions
DTKRHSS

SEQ ID NO: 1269 - protein, 7 aa, Artificial Sequence
  Amino acid sequence derived from Murine monoclonal antibody and further modified by amino acid substitutions
DTKRHKS

SEQ ID NO: 1270 - protein, 7 aa, Artificial Sequence
  Amino acid sequence derived from Murine monoclonal antibody and further modified by amino acid substitutions
DTKRHRS

SEQ ID NO: 1271 - protein, 7 aa, Artificial Sequence
  Amino acid sequence derived from Murine monoclonal antibody and further modified by amino acid substitutions
DTKRHHS

SEQ ID NO: 1272 - protein, 7 aa, Artificial Sequence
  Amino acid sequence derived from Murine monoclonal antibody and further modified by amino acid substitutions
DTKRHPS

SEQ ID NO: 1273 - protein, 7 aa, Artificial Sequence
  Amino acid sequence derived from Murine monoclonal antibody and further modified by amino acid substitutions
DTKRHTS

SEQ ID NO: 1274 - protein, 7 aa, Artificial Sequence
  Amino acid sequence derived from Murine monoclonal antibody and further modified by amino acid substitutions
DTKRHDS

SEQ ID NO: 1275 - protein, 7 aa, Artificial Sequence
  Amino acid sequence derived from Murine monoclonal antibody and further modified by amino acid substitutions
DTKRQAS

SEQ ID NO: 1276 - protein, 7 aa, Artificial Sequence
  Amino acid sequence derived from Murine monoclonal antibody and further modified by amino acid substitutions
DTKRQSS

SEQ ID NO: 1277 - protein, 7 aa, Artificial Sequence
  Amino acid sequence derived from Murine monoclonal antibody and further modified by amino acid substitutions
DTKRQKS

SEQ ID NO: 1278 - protein, 7 aa, Artificial Sequence
  Amino acid sequence derived from Murine monoclonal antibody and further modified by amino acid substitutions
DTKRQRS

SEQ ID NO: 1279 - protein, 7 aa, Artificial Sequence
  Amino acid sequence derived from Murine monoclonal antibody and further modified by amino acid substitutions
DTKRQHS

SEQ ID NO: 1280 - protein, 7 aa, Artificial Sequence
  Amino acid sequence derived from Murine monoclonal antibody and further modified by amino acid substitutions
DTKRQPS

SEQ ID NO: 1281 - protein, 7 aa, Artificial Sequence
  Amino acid sequence derived from Murine monoclonal antibody and further modified by amino acid substitutions
DTKRQTS

SEQ ID NO: 1282 - protein, 7 aa, Artificial Sequence
  Amino acid sequence derived from Murine monoclonal antibody and further modified by amino acid substitutions
DTKRQDS

SEQ ID NO: 1283 - protein, 7 aa, Artificial Sequence
  Amino acid sequence derived from Murine monoclonal antibody and further modified by amino acid substitutions
DTKYLAS

SEQ ID NO: 1284 - protein, 7 aa, Artificial Sequence
  Amino acid sequence derived from Murine monoclonal antibody and further modified by amino acid substitutions
DTKYLSS

SEQ ID NO: 1285 - protein, 7 aa, Artificial Sequence
  Amino acid sequence derived from Murine monoclonal antibody and further modified by amino acid substitutions
DTKYLKS

SEQ ID NO: 1286 - protein, 7 aa, Artificial Sequence
  Amino acid sequence derived from Murine monoclonal antibody and further modified by amino acid substitutions
DTKYLRS

SEQ ID NO: 1287 - protein, 7 aa, Artificial Sequence
  Amino acid sequence derived from Murine monoclonal antibody and further modified by amino acid substitutions
DTKYLHS

SEQ ID NO: 1288 - protein, 7 aa, Artificial Sequence
  Amino acid sequence derived from Murine monoclonal antibody and further modified by amino acid substitutions
DTKYLPS

SEQ ID NO: 1289 - protein, 7 aa, Artificial Sequence
  Amino acid sequence derived from Murine monoclonal antibody and further modified by amino acid substitutions
DTKYLTS

SEQ ID NO: 1290 - protein, 7 aa, Artificial Sequence
  Amino acid sequence derived from Murine monoclonal antibody and further modified by amino acid substitutions
DTKYLDS

SEQ ID NO: 1291 - protein, 7 aa, Artificial Sequence
  Amino acid sequence derived from Murine monoclonal antibody and further modified by amino acid substitutions
DTKYHAS

SEQ ID NO: 1292 - protein, 7 aa, Artificial Sequence
  Amino acid sequence derived from Murine monoclonal antibody and further modified by amino acid substitutions
DTKYHSS

SEQ ID NO: 1293 - protein, 7 aa, Artificial Sequence
  Amino acid sequence derived from Murine monoclonal antibody and further modified by amino acid substitutions
DTKYHKS

SEQ ID NO: 1294 - protein, 7 aa, Artificial Sequence
  Amino acid sequence derived from Murine monoclonal antibody and further modified by amino acid substitutions
DTKYHRS

SEQ ID NO: 1295 - protein, 7 aa, Artificial Sequence
  Amino acid sequence derived from Murine monoclonal antibody and further modified by amino acid substitutions
DTKYHHS

SEQ ID NO: 1296 - protein, 7 aa, Artificial Sequence
  Amino acid sequence derived from Murine monoclonal antibody and further modified by amino acid substitutions
DTKYHPS

SEQ ID NO: 1297 - protein, 7 aa, Artificial Sequence
  Amino acid sequence derived from Murine monoclonal antibody and further modified by amino acid substitutions
DTKYHTS

SEQ ID NO: 1298 - protein, 7 aa, Artificial Sequence
  Amino acid sequence derived from Murine monoclonal antibody and further modified by amino acid substitutions
DTKYHDS

SEQ ID NO: 1299 - protein, 7 aa, Artificial Sequence
  Amino acid sequence derived from Murine monoclonal antibody and further modified by amino acid substitutions
DTKYQAS

SEQ ID NO: 1300 - protein, 7 aa, Artificial Sequence
  Amino acid sequence derived from Murine monoclonal antibody and further modified by amino acid substitutions
DTKYQSS

SEQ ID NO: 1301 - protein, 7 aa, Artificial Sequence
  Amino acid sequence derived from Murine monoclonal antibody and further modified by amino acid substitutions
DTKYQKS

SEQ ID NO: 1302 - protein, 7 aa, Artificial Sequence
  Amino acid sequence derived from Murine monoclonal antibody and further modified by amino acid substitutions
DTKYQRS

SEQ ID NO: 1303 - protein, 7 aa, Artificial Sequence
  Amino acid sequence derived from Murine monoclonal antibody and further modified by amino acid substitutions
DTKYQHS

SEQ ID NO: 1304 - protein, 7 aa, Artificial Sequence
  Amino acid sequence derived from Murine monoclonal antibody and further modified by amino acid substitutions
DTKYQPS

SEQ ID NO: 1305 - protein, 7 aa, Artificial Sequence
  Amino acid sequence derived from Murine monoclonal antibody and further modified by amino acid substitutions
DTKYQTS

SEQ ID NO: 1306 - protein, 7 aa, Artificial Sequence
  Amino acid sequence derived from Murine monoclonal antibody and further modified by amino acid substitutions
DTKYQDS

SEQ ID NO: 1307 - protein, 7 aa, Artificial Sequence
  Amino acid sequence derived from Murine monoclonal antibody and further modified by amino acid substitutions
DTKFLAS

SEQ ID NO: 1308 - protein, 7 aa, Artificial Sequence
  Amino acid sequence derived from Murine monoclonal antibody and further modified by amino acid substitutions
DTKFLSS

SEQ ID NO: 1309 - protein, 7 aa, Artificial Sequence
  Amino acid sequence derived from Murine monoclonal antibody and further modified by amino acid substitutions
DTKFLKS

SEQ ID NO: 1310 - protein, 7 aa, Artificial Sequence
  Amino acid sequence derived from Murine monoclonal antibody and further modified by amino acid substitutions
DTKFLRS

SEQ ID NO: 1311 - protein, 7 aa, Artificial Sequence
  Amino acid sequence derived from Murine monoclonal antibody and further modified by amino acid substitutions
DTKFLHS

SEQ ID NO: 1312 - protein, 7 aa, Artificial Sequence
  Amino acid sequence derived from Murine monoclonal antibody and further modified by amino acid substitutions
DTKFLPS

SEQ ID NO: 1313 - protein, 7 aa, Artificial Sequence
  Amino acid sequence derived from Murine monoclonal antibody and further modified by amino acid substitutions
DTKFLTS

SEQ ID NO: 1314 - protein, 7 aa, Artificial Sequence
  Amino acid sequence derived from Murine monoclonal antibody and further modified by amino acid substitutions
DTKFLDS

SEQ ID NO: 1315 - protein, 7 aa, Artificial Sequence
  Amino acid sequence derived from Murine monoclonal antibody and further modified by amino acid substitutions
DTKFHAS

SEQ ID NO: 1316 - protein, 7 aa, Artificial Sequence
  Amino acid sequence derived from Murine monoclonal antibody and further modified by amino acid substitutions
DTKFHSS

SEQ ID NO: 1317 - protein, 7 aa, Artificial Sequence
  Amino acid sequence derived from Murine monoclonal antibody and further modified by amino acid substitutions
DTKFHKS

SEQ ID NO: 1318 - protein, 7 aa, Artificial Sequence
  Amino acid sequence derived from Murine monoclonal antibody and further modified by amino acid substitutions
DTKFHRS

SEQ ID NO: 1319 - protein, 7 aa, Artificial Sequence
  Amino acid sequence derived from Murine monoclonal antibody and further modified by amino acid substitutions
DTKFHHS

SEQ ID NO: 1320 - protein, 7 aa, Artificial Sequence
  Amino acid sequence derived from Murine monoclonal antibody and further modified by amino acid substitutions
DTKFHPS

SEQ ID NO: 1321 - protein, 7 aa, Artificial Sequence
  Amino acid sequence derived from Murine monoclonal antibody and further modified by amino acid substitutions
DTKFHTS

SEQ ID NO: 1322 - protein, 7 aa, Artificial Sequence
  Amino acid sequence derived from Murine monoclonal antibody and further modified by amino acid substitutions
DTKFHDS

SEQ ID NO: 1323 - protein, 7 aa, Artificial Sequence
  Amino acid sequence derived from Murine monoclonal antibody and further modified by amino acid substitutions
DTKFQAS

SEQ ID NO: 1324 - protein, 7 aa, Artificial Sequence
  Amino acid sequence derived from Murine monoclonal antibody and further modified by amino acid substitutions
DTKFQSS

SEQ ID NO: 1325 - protein, 7 aa, Artificial Sequence
  Amino acid sequence derived from Murine monoclonal antibody and further modified by amino acid substitutions
DTKFQKS

SEQ ID NO: 1326 - protein, 7 aa, Artificial Sequence
  Amino acid sequence derived from Murine monoclonal antibody and further modified by amino acid substitutions
DTKFQRS

SEQ ID NO: 1327 - protein, 7 aa, Artificial Sequence
  Amino acid sequence derived from Murine monoclonal antibody and further modified by amino acid substitutions
DTKFQHS

SEQ ID NO: 1328 - protein, 7 aa, Artificial Sequence
  Amino acid sequence derived from Murine monoclonal antibody and further modified by amino acid substitutions
DTKFQPS

SEQ ID NO: 1329 - protein, 7 aa, Artificial Sequence
  Amino acid sequence derived from Murine monoclonal antibody and further modified by amino acid substitutions
DTKFQTS

SEQ ID NO: 1330 - protein, 7 aa, Artificial Sequence
  Amino acid sequence derived from Murine monoclonal antibody and further modified by amino acid substitutions
DTKFQDS

SEQ ID NO: 1331 - protein, 7 aa, Artificial Sequence
  Amino acid sequence derived from Murine monoclonal antibody and further modified by amino acid substitutions
DTKLLAS

SEQ ID NO: 1332 - protein, 7 aa, Artificial Sequence
  Amino acid sequence derived from Murine monoclonal antibody and further modified by amino acid substitutions
DTKLLSS

SEQ ID NO: 1333 - protein, 7 aa, Artificial Sequence
  Amino acid sequence derived from Murine monoclonal antibody and further modified by amino acid substitutions
DTKLLKS

SEQ ID NO: 1334 - protein, 7 aa, Artificial Sequence
  Amino acid sequence derived from Murine monoclonal antibody and further modified by amino acid substitutions
DTKLLRS

SEQ ID NO: 1335 - protein, 7 aa, Artificial Sequence
  Amino acid sequence derived from Murine monoclonal antibody and further modified by amino acid substitutions
DTKLLHS

SEQ ID NO: 1336 - protein, 7 aa, Artificial Sequence
  Amino acid sequence derived from Murine monoclonal antibody and further modified by amino acid substitutions
DTKLLPS

SEQ ID NO: 1337 - protein, 7 aa, Artificial Sequence
  Amino acid sequence derived from Murine monoclonal antibody and further modified by amino acid substitutions
DTKLLTS

SEQ ID NO: 1338 - protein, 7 aa, Artificial Sequence
  Amino acid sequence derived from Murine monoclonal antibody and further modified by amino acid substitutions
DTKLLDS

SEQ ID NO: 1339 - protein, 7 aa, Artificial Sequence
  Amino acid sequence derived from Murine monoclonal antibody and further modified by amino acid substitutions
DTKLHAS

SEQ ID NO: 1340 - protein, 7 aa, Artificial Sequence
  Amino acid sequence derived from Murine monoclonal antibody and further modified by amino acid substitutions
DTKLHSS

SEQ ID NO: 1341 - protein, 7 aa, Artificial Sequence
  Amino acid sequence derived from Murine monoclonal antibody and further modified by amino acid substitutions
DTKLHKS

SEQ ID NO: 1342 - protein, 7 aa, Artificial Sequence
  Amino acid sequence derived from Murine monoclonal antibody and further modified by amino acid substitutions
DTKLHRS

SEQ ID NO: 1343 - protein, 7 aa, Artificial Sequence
  Amino acid sequence derived from Murine monoclonal antibody and further modified by amino acid substitutions
DTKLHHS

SEQ ID NO: 1344 - protein, 7 aa, Artificial Sequence
  Amino acid sequence derived from Murine monoclonal antibody and further modified by amino acid substitutions
DTKLHPS

SEQ ID NO: 1345 - protein, 7 aa, Artificial Sequence
  Amino acid sequence derived from Murine monoclonal antibody and further modified by amino acid substitutions
DTKLHTS

SEQ ID NO: 1346 - protein, 7 aa, Artificial Sequence
  Amino acid sequence derived from Murine monoclonal antibody and further modified by amino acid substitutions
DTKLHDS

SEQ ID NO: 1347 - protein, 7 aa, Artificial Sequence
  Amino acid sequence derived from Murine monoclonal antibody and further modified by amino acid substitutions
DTKLQAS

SEQ ID NO: 1348 - protein, 7 aa, Artificial Sequence
  Amino acid sequence derived from Murine monoclonal antibody and further modified by amino acid substitutions
DTKLQSS

SEQ ID NO: 1349 - protein, 7 aa, Artificial Sequence
  Amino acid sequence derived from Murine monoclonal antibody and further modified by amino acid substitutions
DTKLQKS

SEQ ID NO: 1350 - protein, 7 aa, Artificial Sequence
  Amino acid sequence derived from Murine monoclonal antibody and further modified by amino acid substitutions
DTKLQRS

SEQ ID NO: 1351 - protein, 7 aa, Artificial Sequence
  Amino acid sequence derived from Murine monoclonal antibody and further modified by amino acid substitutions
DTKLQHS

SEQ ID NO: 1352 - protein, 7 aa, Artificial Sequence
  Amino acid sequence derived from Murine monoclonal antibody and further modified by amino acid substitutions
DTKLQPS

SEQ ID NO: 1353 - protein, 7 aa, Artificial Sequence
  Amino acid sequence derived from Murine monoclonal antibody and further modified by amino acid substitutions
DTKLQTS

SEQ ID NO: 1354 - protein, 7 aa, Artificial Sequence
  Amino acid sequence derived from Murine monoclonal antibody and further modified by amino acid substitutions
DTKLQDS

SEQ ID NO: 1355 - protein, 7 aa, Artificial Sequence
  Amino acid sequence derived from Murine monoclonal antibody and further modified by amino acid substitutions
DTLKLSS

SEQ ID NO: 1356 - protein, 7 aa, Artificial Sequence
  Amino acid sequence derived from Murine monoclonal antibody and further modified by amino acid substitutions
DTLKLKS

SEQ ID NO: 1357 - protein, 7 aa, Artificial Sequence
  Amino acid sequence derived from Murine monoclonal antibody and further modified by amino acid substitutions
DTLKLRS

SEQ ID NO: 1358 - protein, 7 aa, Artificial Sequence
  Amino acid sequence derived from Murine monoclonal antibody and further modified by amino acid substitutions
DTLKLHS

SEQ ID NO: 1359 - protein, 7 aa, Artificial Sequence
  Amino acid sequence derived from Murine monoclonal antibody and further modified by amino acid substitutions
DTLKLPS

SEQ ID NO: 1360 - protein, 7 aa, Artificial Sequence
  Amino acid sequence derived from Murine monoclonal antibody and further modified by amino acid substitutions
DTLKLTS

SEQ ID NO: 1361 - protein, 7 aa, Artificial Sequence
  Amino acid sequence derived from Murine monoclonal antibody and further modified by amino acid substitutions
DTLKHAS

SEQ ID NO: 1362 - protein, 7 aa, Artificial Sequence
  Amino acid sequence derived from Murine monoclonal antibody and further modified by amino acid substitutions
DTLKHSS

SEQ ID NO: 1363 - protein, 7 aa, Artificial Sequence
  Amino acid sequence derived from Murine monoclonal antibody and further modified by amino acid substitutions
DTLKHKS

SEQ ID NO: 1364 - protein, 7 aa, Artificial Sequence
  Amino acid sequence derived from Murine monoclonal antibody and further modified by amino acid substitutions
DTLKHRS

SEQ ID NO: 1365 - protein, 7 aa, Artificial Sequence
  Amino acid sequence derived from Murine monoclonal antibody and further modified by amino acid substitutions
DTLKHHS

SEQ ID NO: 1366 - protein, 7 aa, Artificial Sequence
  Amino acid sequence derived from Murine monoclonal antibody and further modified by amino acid substitutions
DTLKHPS

SEQ ID NO: 1367 - protein, 7 aa, Artificial Sequence
  Amino acid sequence derived from Murine monoclonal antibody and further modified by amino acid substitutions
DTLKHTS

SEQ ID NO: 1368 - protein, 7 aa, Artificial Sequence
  Amino acid sequence derived from Murine monoclonal antibody and further modified by amino acid substitutions
DTLKHDS

SEQ ID NO: 1369 - protein, 7 aa, Artificial Sequence
  Amino acid sequence derived from Murine monoclonal antibody and further modified by amino acid substitutions
DTLKQAS

SEQ ID NO: 1370 - protein, 7 aa, Artificial Sequence
  Amino acid sequence derived from Murine monoclonal antibody and further modified by amino acid substitutions
DTLKQSS

SEQ ID NO: 1371 - protein, 7 aa, Artificial Sequence
  Amino acid sequence derived from Murine monoclonal antibody and further modified by amino acid substitutions
DTLKQKS

SEQ ID NO: 1372 - protein, 7 aa, Artificial Sequence
  Amino acid sequence derived from Murine monoclonal antibody and further modified by amino acid substitutions
DTLKQRS

SEQ ID NO: 1373 - protein, 7 aa, Artificial Sequence
  Amino acid sequence derived from Murine monoclonal antibody and further modified by amino acid substitutions
DTLKQHS

SEQ ID NO: 1374 - protein, 7 aa, Artificial Sequence
  Amino acid sequence derived from Murine monoclonal antibody and further modified by amino acid substitutions
DTLKQPS

SEQ ID NO: 1375 - protein, 7 aa, Artificial Sequence
  Amino acid sequence derived from Murine monoclonal antibody and further modified by amino acid substitutions
DTLKQTS

SEQ ID NO: 1376 - protein, 7 aa, Artificial Sequence
  Amino acid sequence derived from Murine monoclonal antibody and further modified by amino acid substitutions
DTLKQDS

SEQ ID NO: 1377 - protein, 7 aa, Artificial Sequence
  Amino acid sequence derived from Murine monoclonal antibody and further modified by amino acid substitutions
DTLGLAS

SEQ ID NO: 1378 - protein, 7 aa, Artificial Sequence
  Amino acid sequence derived from Murine monoclonal antibody and further modified by amino acid substitutions
DTLGLSS

SEQ ID NO: 1379 - protein, 7 aa, Artificial Sequence
  Amino acid sequence derived from Murine monoclonal antibody and further modified by amino acid substitutions
DTLGLKS

SEQ ID NO: 1380 - protein, 7 aa, Artificial Sequence
  Amino acid sequence derived from Murine monoclonal antibody and further modified by amino acid substitutions
DTLGLRS

SEQ ID NO: 1381 - protein, 7 aa, Artificial Sequence
  Amino acid sequence derived from Murine monoclonal antibody and further modified by amino acid substitutions
DTLGLHS

SEQ ID NO: 1382 - protein, 7 aa, Artificial Sequence
  Amino acid sequence derived from Murine monoclonal antibody and further modified by amino acid substitutions
DTLGLPS

SEQ ID NO: 1383 - protein, 7 aa, Artificial Sequence
  Amino acid sequence derived from Murine monoclonal antibody and further modified by amino acid substitutions
DTLGLTS

SEQ ID NO: 1384 - protein, 7 aa, Artificial Sequence
  Amino acid sequence derived from Murine monoclonal antibody and further modified by amino acid substitutions
DTLGLDS

SEQ ID NO: 1385 - protein, 7 aa, Artificial Sequence
  Amino acid sequence derived from Murine monoclonal antibody and further modified by amino acid substitutions
DTLGHAS

SEQ ID NO: 1386 - protein, 7 aa, Artificial Sequence
  Amino acid sequence derived from Murine monoclonal antibody and further modified by amino acid substitutions
DTLGHSS

SEQ ID NO: 1387 - protein, 7 aa, Artificial Sequence
  Amino acid sequence derived from Murine monoclonal antibody and further modified by amino acid substitutions
DTLGHKS

SEQ ID NO: 1388 - protein, 7 aa, Artificial Sequence
  Amino acid sequence derived from Murine monoclonal antibody and further modified by amino acid substitutions
DTLGHRS

SEQ ID NO: 1389 - protein, 7 aa, Artificial Sequence
  Amino acid sequence derived from Murine monoclonal antibody and further modified by amino acid substitutions
DTLGHHS

SEQ ID NO: 1390 - protein, 7 aa, Artificial Sequence
  Amino acid sequence derived from Murine monoclonal antibody and further modified by amino acid substitutions
DTLGHPS

SEQ ID NO: 1391 - protein, 7 aa, Artificial Sequence
  Amino acid sequence derived from Murine monoclonal antibody and further modified by amino acid substitutions
DTLGHTS

SEQ ID NO: 1392 - protein, 7 aa, Artificial Sequence
  Amino acid sequence derived from Murine monoclonal antibody and further modified by amino acid substitutions
DTLGHDS

SEQ ID NO: 1393 - protein, 7 aa, Artificial Sequence
  Amino acid sequence derived from Murine monoclonal antibody and further modified by amino acid substitutions
DTLGQAS

SEQ ID NO: 1394 - protein, 7 aa, Artificial Sequence
  Amino acid sequence derived from Murine monoclonal antibody and further modified by amino acid substitutions
DTLGQSS

SEQ ID NO: 1395 - protein, 7 aa, Artificial Sequence
  Amino acid sequence derived from Murine monoclonal antibody and further modified by amino acid substitutions
DTLGQKS

SEQ ID NO: 1396 - protein, 7 aa, Artificial Sequence
  Amino acid sequence derived from Murine monoclonal antibody and further modified by amino acid substitutions
DTLGQRS

SEQ ID NO: 1397 - protein, 7 aa, Artificial Sequence
  Amino acid sequence derived from Murine monoclonal antibody and further modified by amino acid substitutions
DTLGQHS

SEQ ID NO: 1398 - protein, 7 aa, Artificial Sequence
  Amino acid sequence derived from Murine monoclonal antibody and further modified by amino acid substitutions
DTLGQPS

SEQ ID NO: 1399 - protein, 7 aa, Artificial Sequence
  Amino acid sequence derived from Murine monoclonal antibody and further modified by amino acid substitutions
DTLGQTS

SEQ ID NO: 1400 - protein, 7 aa, Artificial Sequence
  Amino acid sequence derived from Murine monoclonal antibody and further modified by amino acid substitutions
DTLGQDS

SEQ ID NO: 1401 - protein, 7 aa, Artificial Sequence
  Amino acid sequence derived from Murine monoclonal antibody and further modified by amino acid substitutions
DTLRLAS

SEQ ID NO: 1402 - protein, 7 aa, Artificial Sequence
  Amino acid sequence derived from Murine monoclonal antibody and further modified by amino acid substitutions
DTLRLSS

SEQ ID NO: 1403 - protein, 7 aa, Artificial Sequence
  Amino acid sequence derived from Murine monoclonal antibody and further modified by amino acid substitutions
DTLRLKS

SEQ ID NO: 1404 - protein, 7 aa, Artificial Sequence
  Amino acid sequence derived from Murine monoclonal antibody and further modified by amino acid substitutions
DTLRLRS

SEQ ID NO: 1405 - protein, 7 aa, Artificial Sequence
  Amino acid sequence derived from Murine monoclonal antibody and further modified by amino acid substitutions
DTLRLHS

SEQ ID NO: 1406 - protein, 7 aa, Artificial Sequence
  Amino acid sequence derived from Murine monoclonal antibody and further modified by amino acid substitutions
DTLRLPS

SEQ ID NO: 1407 - protein, 7 aa, Artificial Sequence
  Amino acid sequence derived from Murine monoclonal antibody and further modified by amino acid substitutions
DTLRLTS

SEQ ID NO: 1408 - protein, 7 aa, Artificial Sequence
  Amino acid sequence derived from Murine monoclonal antibody and further modified by amino acid substitutions
DTLRLDS

SEQ ID NO: 1409 - protein, 7 aa, Artificial Sequence
  Amino acid sequence derived from Murine monoclonal antibody and further modified by amino acid substitutions
DTLRHAS

SEQ ID NO: 1410 - protein, 7 aa, Artificial Sequence
  Amino acid sequence derived from Murine monoclonal antibody and further modified by amino acid substitutions
DTLRHSS

SEQ ID NO: 1411 - protein, 7 aa, Artificial Sequence
  Amino acid sequence derived from Murine monoclonal antibody and further modified by amino acid substitutions
DTLRHKS

SEQ ID NO: 1412 - protein, 7 aa, Artificial Sequence
  Amino acid sequence derived from Murine monoclonal antibody and further modified by amino acid substitutions
DTLRHRS

SEQ ID NO: 1413 - protein, 7 aa, Artificial Sequence
  Amino acid sequence derived from Murine monoclonal antibody and further modified by amino acid substitutions
DTLRHHS

SEQ ID NO: 1414 - protein, 7 aa, Artificial Sequence
  Amino acid sequence derived from Murine monoclonal antibody and further modified by amino acid substitutions
DTLRHPS

SEQ ID NO: 1415 - protein, 7 aa, Artificial Sequence
  Amino acid sequence derived from Murine monoclonal antibody and further modified by amino acid substitutions
DTLRHTS

SEQ ID NO: 1416 - protein, 7 aa, Artificial Sequence
  Amino acid sequence derived from Murine monoclonal antibody and further modified by amino acid substitutions
DTLRHDS

SEQ ID NO: 1417 - protein, 7 aa, Artificial Sequence
  Amino acid sequence derived from Murine monoclonal antibody and further modified by amino acid substitutions
DTLRQAS

SEQ ID NO: 1418 - protein, 7 aa, Artificial Sequence
  Amino acid sequence derived from Murine monoclonal antibody and further modified by amino acid substitutions
DTLRQSS

SEQ ID NO: 1419 - protein, 7 aa, Artificial Sequence
  Amino acid sequence derived from Murine monoclonal antibody and further modified by amino acid substitutions
DTLRQKS

SEQ ID NO: 1420 - protein, 7 aa, Artificial Sequence
  Amino acid sequence derived from Murine monoclonal antibody and further modified by amino acid substitutions
DTLRQRS

SEQ ID NO: 1421 - protein, 7 aa, Artificial Sequence
  Amino acid sequence derived from Murine monoclonal antibody and further modified by amino acid substitutions
DTLRQHS

SEQ ID NO: 1422 - protein, 7 aa, Artificial Sequence
  Amino acid sequence derived from Murine monoclonal antibody and further modified by amino acid substitutions
DTLRQPS

SEQ ID NO: 1423 - protein, 7 aa, Artificial Sequence
  Amino acid sequence derived from Murine monoclonal antibody and further modified by amino acid substitutions
DTLRQTS

SEQ ID NO: 1424 - protein, 7 aa, Artificial Sequence
  Amino acid sequence derived from Murine monoclonal antibody and further modified by amino acid substitutions
DTLRQDS

SEQ ID NO: 1425 - protein, 7 aa, Artificial Sequence
  Amino acid sequence derived from Murine monoclonal antibody and further modified by amino acid substitutions
DTLYLAS

SEQ ID NO: 1426 - protein, 7 aa, Artificial Sequence
  Amino acid sequence derived from Murine monoclonal antibody and further modified by amino acid substitutions
DTLYLSS

SEQ ID NO: 1427 - protein, 7 aa, Artificial Sequence
  Amino acid sequence derived from Murine monoclonal antibody and further modified by amino acid substitutions
DTLYLKS

SEQ ID NO: 1428 - protein, 7 aa, Artificial Sequence
  Amino acid sequence derived from Murine monoclonal antibody and further modified by amino acid substitutions
DTLYLRS

SEQ ID NO: 1429 - protein, 7 aa, Artificial Sequence
  Amino acid sequence derived from Murine monoclonal antibody and further modified by amino acid substitutions
DTLYLHS

SEQ ID NO: 1430 - protein, 7 aa, Artificial Sequence
  Amino acid sequence derived from Murine monoclonal antibody and further modified by amino acid substitutions
DTLYLPS

SEQ ID NO: 1431 - protein, 7 aa, Artificial Sequence
  Amino acid sequence derived from Murine monoclonal antibody and further modified by amino acid substitutions
DTLYLTS

SEQ ID NO: 1432 - protein, 7 aa, Artificial Sequence
  Amino acid sequence derived from Murine monoclonal antibody and further modified by amino acid substitutions
DTLYLDS

SEQ ID NO: 1433 - protein, 7 aa, Artificial Sequence
  Amino acid sequence derived from Murine monoclonal antibody and further modified by amino acid substitutions
DTLYHAS

SEQ ID NO: 1434 - protein, 7 aa, Artificial Sequence
  Amino acid sequence derived from Murine monoclonal antibody and further modified by amino acid substitutions
DTLYHSS

SEQ ID NO: 1435 - protein, 7 aa, Artificial Sequence
  Amino acid sequence derived from Murine monoclonal antibody and further modified by amino acid substitutions
DTLYHKS

SEQ ID NO: 1436 - protein, 7 aa, Artificial Sequence
  Amino acid sequence derived from Murine monoclonal antibody and further modified by amino acid substitutions
DTLYHRS

SEQ ID NO: 1437 - protein, 7 aa, Artificial Sequence
  Amino acid sequence derived from Murine monoclonal antibody and further modified by amino acid substitutions
DTLYHHS

SEQ ID NO: 1438 - protein, 7 aa, Artificial Sequence
  Amino acid sequence derived from Murine monoclonal antibody and further modified by amino acid substitutions
DTLYHPS

SEQ ID NO: 1439 - protein, 7 aa, Artificial Sequence
  Amino acid sequence derived from Murine monoclonal antibody and further modified by amino acid substitutions
DTLYHTS

SEQ ID NO: 1440 - protein, 7 aa, Artificial Sequence
  Amino acid sequence derived from Murine monoclonal antibody and further modified by amino acid substitutions
DTLYHDS

SEQ ID NO: 1441 - protein, 7 aa, Artificial Sequence
  Amino acid sequence derived from Murine monoclonal antibody and further modified by amino acid substitutions
DTLYQAS

SEQ ID NO: 1442 - protein, 7 aa, Artificial Sequence
  Amino acid sequence derived from Murine monoclonal antibody and further modified by amino acid substitutions
DTLYQSS

SEQ ID NO: 1443 - protein, 7 aa, Artificial Sequence
  Amino acid sequence derived from Murine monoclonal antibody and further modified by amino acid substitutions
DTLYQKS

SEQ ID NO: 1444 - protein, 7 aa, Artificial Sequence
  Amino acid sequence derived from Murine monoclonal antibody and further modified by amino acid substitutions
DTLYQRS

SEQ ID NO: 1445 - protein, 7 aa, Artificial Sequence
  Amino acid sequence derived from Murine monoclonal antibody and further modified by amino acid substitutions
DTLYQHS

SEQ ID NO: 1446 - protein, 7 aa, Artificial Sequence
  Amino acid sequence derived from Murine monoclonal antibody and further modified by amino acid substitutions
DTLYQPS

SEQ ID NO: 1447 - protein, 7 aa, Artificial Sequence
  Amino acid sequence derived from Murine monoclonal antibody and further modified by amino acid substitutions
DTLYQTS

SEQ ID NO: 1448 - protein, 7 aa, Artificial Sequence
  Amino acid sequence derived from Murine monoclonal antibody and further modified by amino acid substitutions
DTLYQDS

SEQ ID NO: 1449 - protein, 7 aa, Artificial Sequence
  Amino acid sequence derived from Murine monoclonal antibody and further modified by amino acid substitutions
DTLFLAS

SEQ ID NO: 1450 - protein, 7 aa, Artificial Sequence
  Amino acid sequence derived from Murine monoclonal antibody and further modified by amino acid substitutions
DTLFLSS

SEQ ID NO: 1451 - protein, 7 aa, Artificial Sequence
  Amino acid sequence derived from Murine monoclonal antibody and further modified by amino acid substitutions
DTLFLKS

SEQ ID NO: 1452 - protein, 7 aa, Artificial Sequence
  Amino acid sequence derived from Murine monoclonal antibody and further modified by amino acid substitutions
DTLFLRS

SEQ ID NO: 1453 - protein, 7 aa, Artificial Sequence
  Amino acid sequence derived from Murine monoclonal antibody and further modified by amino acid substitutions
DTLFLHS

SEQ ID NO: 1454 - protein, 7 aa, Artificial Sequence
  Amino acid sequence derived from Murine monoclonal antibody and further modified by amino acid substitutions
DTLFLPS

SEQ ID NO: 1455 - protein, 7 aa, Artificial Sequence
  Amino acid sequence derived from Murine monoclonal antibody and further modified by amino acid substitutions
DTLFLTS

SEQ ID NO: 1456 - protein, 7 aa, Artificial Sequence
  Amino acid sequence derived from Murine monoclonal antibody and further modified by amino acid substitutions
DTLFLDS

SEQ ID NO: 1457 - protein, 7 aa, Artificial Sequence
  Amino acid sequence derived from Murine monoclonal antibody and further modified by amino acid substitutions
DTLFHAS

SEQ ID NO: 1458 - protein, 7 aa, Artificial Sequence
  Amino acid sequence derived from Murine monoclonal antibody and further modified by amino acid substitutions
DTLFHSS

SEQ ID NO: 1459 - protein, 7 aa, Artificial Sequence
  Amino acid sequence derived from Murine monoclonal antibody and further modified by amino acid substitutions
DTLFHKS

SEQ ID NO: 1460 - protein, 7 aa, Artificial Sequence
  Amino acid sequence derived from Murine monoclonal antibody and further modified by amino acid substitutions
DTLFHRS

SEQ ID NO: 1461 - protein, 7 aa, Artificial Sequence
  Amino acid sequence derived from Murine monoclonal antibody and further modified by amino acid substitutions
DTLFHHS

SEQ ID NO: 1462 - protein, 7 aa, Artificial Sequence
  Amino acid sequence derived from Murine monoclonal antibody and further modified by amino acid substitutions
DTLFHPS

SEQ ID NO: 1463 - protein, 7 aa, Artificial Sequence
  Amino acid sequence derived from Murine monoclonal antibody and further modified by amino acid substitutions
DTLFHTS

SEQ ID NO: 1464 - protein, 7 aa, Artificial Sequence
  Amino acid sequence derived from Murine monoclonal antibody and further modified by amino acid substitutions
DTLFHDS

SEQ ID NO: 1465 - protein, 7 aa, Artificial Sequence
  Amino acid sequence derived from Murine monoclonal antibody and further modified by amino acid substitutions
DTLFQAS

SEQ ID NO: 1466 - protein, 7 aa, Artificial Sequence
  Amino acid sequence derived from Murine monoclonal antibody and further modified by amino acid substitutions
DTLFQSS

SEQ ID NO: 1467 - protein, 7 aa, Artificial Sequence
  Amino acid sequence derived from Murine monoclonal antibody and further modified by amino acid substitutions
DTLFQKS

SEQ ID NO: 1468 - protein, 7 aa, Artificial Sequence
  Amino acid sequence derived from Murine monoclonal antibody and further modified by amino acid substitutions
DTLFQRS

SEQ ID NO: 1469 - protein, 7 aa, Artificial Sequence
  Amino acid sequence derived from Murine monoclonal antibody and further modified by amino acid substitutions
DTLFQHS

SEQ ID NO: 1470 - protein, 7 aa, Artificial Sequence
  Amino acid sequence derived from Murine monoclonal antibody and further modified by amino acid substitutions
DTLFQPS

SEQ ID NO: 1471 - protein, 7 aa, Artificial Sequence
  Amino acid sequence derived from Murine monoclonal antibody and further modified by amino acid substitutions
DTLFQTS

SEQ ID NO: 1472 - protein, 7 aa, Artificial Sequence
  Amino acid sequence derived from Murine monoclonal antibody and further modified by amino acid substitutions
DTLFQDS

SEQ ID NO: 1473 - protein, 7 aa, Artificial Sequence
  Amino acid sequence derived from Murine monoclonal antibody and further modified by amino acid substitutions
DTLLLSS

SEQ ID NO: 1474 - protein, 7 aa, Artificial Sequence
  Amino acid sequence derived from Murine monoclonal antibody and further modified by amino acid substitutions
DTLLLKS

SEQ ID NO: 1475 - protein, 7 aa, Artificial Sequence
  Amino acid sequence derived from Murine monoclonal antibody and further modified by amino acid substitutions
DTLLLRS

SEQ ID NO: 1476 - protein, 7 aa, Artificial Sequence
  Amino acid sequence derived from Murine monoclonal antibody and further modified by amino acid substitutions
DTLLLHS

SEQ ID NO: 1477 - protein, 7 aa, Artificial Sequence
  Amino acid sequence derived from Murine monoclonal antibody and further modified by amino acid substitutions
DTLLLPS

SEQ ID NO: 1478 - protein, 7 aa, Artificial Sequence
  Amino acid sequence derived from Murine monoclonal antibody and further modified by amino acid substitutions
DTLLLTS

SEQ ID NO: 1479 - protein, 7 aa, Artificial Sequence
  Amino acid sequence derived from Murine monoclonal antibody and further modified by amino acid substitutions
DTLLHAS

SEQ ID NO: 1480 - protein, 7 aa, Artificial Sequence
  Amino acid sequence derived from Murine monoclonal antibody and further modified by amino acid substitutions
DTLLHSS

SEQ ID NO: 1481 - protein, 7 aa, Artificial Sequence
  Amino acid sequence derived from Murine monoclonal antibody and further modified by amino acid substitutions
DTLLHKS

SEQ ID NO: 1482 - protein, 7 aa, Artificial Sequence
  Amino acid sequence derived from Murine monoclonal antibody and further modified by amino acid substitutions
DTLLHRS

SEQ ID NO: 1483 - protein, 7 aa, Artificial Sequence
  Amino acid sequence derived from Murine monoclonal antibody and further modified by amino acid substitutions
DTLLHHS

SEQ ID NO: 1484 - protein, 7 aa, Artificial Sequence
  Amino acid sequence derived from Murine monoclonal antibody and further modified by amino acid substitutions
DTLLHPS

SEQ ID NO: 1485 - protein, 7 aa, Artificial Sequence
  Amino acid sequence derived from Murine monoclonal antibody and further modified by amino acid substitutions
DTLLHTS

SEQ ID NO: 1486 - protein, 7 aa, Artificial Sequence
  Amino acid sequence derived from Murine monoclonal antibody and further modified by amino acid substitutions
DTLLHDS

SEQ ID NO: 1487 - protein, 7 aa, Artificial Sequence
  Amino acid sequence derived from Murine monoclonal antibody and further modified by amino acid substitutions
DTLLQAS

SEQ ID NO: 1488 - protein, 7 aa, Artificial Sequence
  Amino acid sequence derived from Murine monoclonal antibody and further modified by amino acid substitutions
DTLLQSS

SEQ ID NO: 1489 - protein, 7 aa, Artificial Sequence
  Amino acid sequence derived from Murine monoclonal antibody and further modified by amino acid substitutions
DTLLQKS

SEQ ID NO: 1490 - protein, 7 aa, Artificial Sequence
  Amino acid sequence derived from Murine monoclonal antibody and further modified by amino acid substitutions
DTLLQRS

SEQ ID NO: 1491 - protein, 7 aa, Artificial Sequence
  Amino acid sequence derived from Murine monoclonal antibody and further modified by amino acid substitutions
DTLLQHS

SEQ ID NO: 1492 - protein, 7 aa, Artificial Sequence
  Amino acid sequence derived from Murine monoclonal antibody and further modified by amino acid substitutions
DTLLQPS

SEQ ID NO: 1493 - protein, 7 aa, Artificial Sequence
  Amino acid sequence derived from Murine monoclonal antibody and further modified by amino acid substitutions
DTLLQTS

SEQ ID NO: 1494 - protein, 7 aa, Artificial Sequence
  Amino acid sequence derived from Murine monoclonal antibody and further modified by amino acid substitutions
DTLLQDS

SEQ ID NO: 1495 - protein, 9 aa, Artificial Sequence
  Amino acid sequence derived from Murine monoclonal antibody and further modified by amino acid substitutions
FQGSYYPFT

SEQ ID NO: 1496 - protein, 9 aa, Artificial Sequence
  Amino acid sequence derived from Murine monoclonal antibody and further modified by amino acid substitutions
FQGSWYPFT
